(19) United States
(12) Patent Application Publication
(10) Pub. No.: US 2024/0002843 A1
(43) Pub. Date: Jan. 4, 2024

(54) COMPOSITIONS AND METHODS FOR THE TREATMENT OF HEMOGLOBINOPATHIES

(71) Applicants: Novartis AG, Basel (CH); Intellia Therapeutics, Inc., Cambridge, MA (US)

(72) Inventors: Anthony Edward BOITANO, Waban, MA (US); Michael COOKE, San Diego, CA (US); Lloyd B. KLICKSTEIN, Newton, MA (US); Reynald LESCARBEAU, Cambridge, MA (US); Craig Stephen MICKANIN, Hopkinton, MA (US); Kabungo MULUMBA, Cambridge, MA (US); Seshidhar Reddy POLICE, Burlington, MA (US); Jennifer SNEAD, San Diego, CA (US); Susan C. STEVENSON, Ashland, MA (US); Morag STEWART, Cambridge, MA (US); Yi YANG, Belmont, MA (US)

(73) Assignees: Novartis AG, Basel (CH); Intellia Therapeutics, Inc., Cambridge, MA (US)

(21) Appl. No.: 17/965,366

(22) Filed: Oct. 13, 2022

Related U.S. Application Data
(63) Continuation of application No. 16/066,617, filed on Jun. 27, 2018, now abandoned.
(60) Provisional application No. 62/347,484, filed on Jun. 8, 2016.
(60) Provisional application No. 62/271,968, filed on Dec. 28, 2015.

(51) Int. Cl. C12N 15/113; A61K 35/15; A61P 7/00

(52) U.S. Cl. CPC C12N 15/113; A61K 35/15; A61P 7/00; C12N 2310/315; C12N 2310/322; C12N 2310/10; C12N 2310/321; C12N 2310/20

(57) ABSTRACT

The present invention is directed to genome editing systems, reagents and methods for the treatment of hemoglobinopathies.

### RELATED APPLICATIONS

[0001] This application is a continuation of U.S. patent application Ser. No. 16/066,617, filed on Jun. 27, 2018, which claims priority to U.S. National Stage entry under 35 U.S.C. § 371 of International Application number PCT/IB2016/058007, filed Dec. 26, 2016, which claims priority to U.S. Provisional Applications 62/271,968 filed Dec. 28, 2015; and 62/347,484 filed Jun. 8, 2016, the contents of which are expressly incorporated herein by reference in their entirety.

### SEQUENCE LISTING

[0002] The instant application contains a Sequence Listing which has been submitted electronically in XML file format and is hereby incorporated by reference in its entirety. Said XML copy, created on Jun. 19, 2023, is named 14452_0032-01000_SL.xml and is 5,009,929 bytes in size.

### BACKGROUND

[0003] CRISPRs (Clustered Regularly Interspaced Short Palindromic Repeats) evolved in bacteria as an adaptive immune system to defend against viral attack. Upon exposure to a virus, short segments of viral DNA are integrated into the CRISPR locus of the bacterial genome. RNA is transcribed from a portion of the CRISPR locus that includes the viral sequence. That RNA, which contains sequence complimentary to the viral genome, mediates targeting of a Cas9 protein to the sequence in the viral genome. The Cas9 protein cleaves and thereby silences the viral target.

[0004] Recently, the CRISPR/Cas system has been adapted for genome editing in eukaryotic cells. The introduction of site-specific single (SSBs) or double strand breaks (DSBs) allows for target sequence alteration through, for example, non-homologous end-joining (NHEJ) or homology-directed repair (HDR).

### SUMMARY OF THE INVENTION

[0005] Without being bound by theory, the invention is based in part on the discovery that CRISPR systems, e.g., Cas9 CRISPR systems, e.g., as described herein, can be used to modify cells (e.g., hematopoietic stem and progenitor cells (HSPCs)) to increase fetal hemoglobin (HbF) expression and/or decrease expression of beta globin (e.g., a beta globin gene having a disease-causing mutation), and that such cells may be used to treat hemoglobinopathies, e.g., sickle cell disease and beta thalassemia.

[0006] Thus, in an aspect, the invention provides CRISPR systems (e.g., Cas CRISPR systems, e.g., Cas9 CRISPR systems, e.g., S. pyogenes Cas9 CRISPR systems) comprising one or more, e.g., one, gRNA molecule as described herein. Any of the gRNA molecules described herein may be used in such systems, and in the methods and cells described herein.

[0007] In an aspect, the invention provides a gRNA molecule that includes a tracr and crRNA, wherein the crRNA includes a targeting domain that is complementary with a target sequence of the BCL11A gene, a BCL11a enhancer, or a HFPH region.

[0008] In another aspect, the invention provides a gRNA molecule that includes a targeting domain that is complementary with a target sequence of the BCL11A gene, e.g., is complementary with a target sequence within a BCL11a coding region (e.g., within a BCL11a exon, e.g., within BCL11a exon 2). In embodiments, the gRNA comprises a targeting domain that includes, e.g., consists of, any one of SEQ ID NO: 1 to SEQ ID NO: 85 or SEQ ID NO: 400 to SEQ ID NO: 1231.

[0009] In another aspect, the invention provides a gRNA molecule that includes a targeting domain that is complementary with a target sequence of a BCL11A enhancer.

[0010] In embodiments, the gRNA comprises a targeting domain that includes, e.g., consists of, any one of SEQ ID NO: 1232 to SEQ ID NO: 1499.

[0011] In embodiments, the gRNA to a target sequence of a BCL11a enhancer is to a target sequence within the +58 region of the BCL11a enhancer, and the targeting domain includes, e.g., consists of, any one of SEQ ID NO: 182 to SEQ ID NO: 277 or SEQ ID NO: 334 to SEQ ID NO: 341. In embodiments, the targeting domain includes, e.g., consists of, any one of SEQ ID NO: 341, SEQ ID NO: 246, SEQ ID NO: 248, SEQ ID NO: 247, SEQ ID NO: 245, SEQ ID NO: 249, SEQ ID NO: 244, SEQ ID NO: 199, SEQ ID NO: 251, SEQ ID NO: 250, SEQ ID NO: 334, SEQ ID NO: 185, SEQ ID NO: 186, SEQ ID NO: 336, or SEQ ID NO: 337. In embodiments, the targeting domain includes, e.g., consists of, SEQ ID NO: 248. In embodiments, the targeting domain includes, e.g., consists of, SEQ ID NO: 247. In embodiments, the targeting domain includes, e.g., consists of, SEQ ID NO: 245. In embodiments, the targeting domain includes, e.g., consists of, SEQ ID NO: 336. In embodiments, the targeting domain includes, e.g., consists of, SEQ ID NO: 337. In embodiments, the targeting domain includes, e.g., consists of, SEQ ID NO: 338. In embodiments, the targeting domain includes, e.g., consists of, SEQ ID NO: 335. In embodiments, the targeting domain includes, e.g., consists of, SEQ ID NO: 252. In an embodiment, the gRNA is a dgRNA that includes a crRNA that includes, e.g., consists of, e.g., from 5′ to 3′, SEQ ID NO: 248-SEQ ID NO: 6607, and a tracr that includes, e.g., consists of, e.g., from 5′ to 3′, SEQ ID NO: 6660.

[0012] In an embodiment, the gRNA is a dgRNA that includes a crRNA that includes, e.g., consists of, e.g., from 5′ to 3′, SEQ ID NO: 247-SEQ ID NO: 6607, and a tracr that includes, e.g., consists of, e.g., from 5′ to 3′, SEQ ID NO: 6660. In an embodiment, the gRNA molecule is a sgRNA molecule and includes, e.g., consists of, e.g., from 5′ to 3′, SEQ ID NO: 338-SEQ ID NO: 6604—UUUU. In an embodiment, the gRNA molecule is a sgRNA molecule and includes, e.g., consists of, e.g., from 5′ to 3′, SEQ ID NO: 335-SEQ ID NO: 6604—UUUU. In an embodiment, the gRNA molecule is a sgRNA molecule and includes, e.g., consists of, e.g., from 5′ to 3′, SEQ ID NO: 336-SEQ ID NO: 6604—UUUU. In an embodiment, the gRNA molecule is a sgRNA molecule and includes, e.g., consists of, e.g., from 5′ to 3′, SEQ ID NO: 245-SEQ ID NO: 6604—UUUU. In an embodiment, the gRNA molecule is a sgRNA molecule and includes, e.g., consists of, e.g., from 5′ to 3′, SEQ ID NO: 337-SEQ ID NO: 6604—UUUU. In an embodiment, the gRNA molecule is a sgRNA molecule and includes, e.g., consists of, e.g., from 5′ to 3′, SEQ ID NO: 252-SEQ ID NO: 6604—UUUU.

[0013] In embodiments, the gRNA to a target sequence of a BCL11a enhancer is to a target sequence within the +62 region of the BCL11a enhancer, and the targeting domain includes, e.g., consists of, any one of SEQ ID NO: 278 to SEQ ID NO: 333. In embodiments, the targeting domain includes, e.g., consists of, any one of SEQ ID NO: 318, SEQ ID NO: 312, SEQ ID NO: 313, SEQ ID NO: 294, SEQ ID NO: 310, SEQ ID NO: 319, SEQ ID NO: 298, SEQ ID NO: 322, SEQ ID NO: 311, SEQ ID NO: 315, SEQ ID NO: 290, SEQ ID NO: 317, SEQ ID NO: 309, SEQ ID NO: 289, or SEQ ID NO: 281. In embodiments, the targeting domain includes, e.g., consists of, SEQ ID NO: 318.

[0014] In embodiments, the gRNA to a target sequence of a BCL11a enhancer is to a target sequence within the +55 region of the BCL11a enhancer, and the targeting domain includes, e.g., consists of, any one of SEQ ID NO: 1596 to SEQ ID NO: 1691. In embodiments, the targeting domain includes, e.g., consists of, any one of SEQ ID NO: 1683, SEQ ID NO: 1638, SEQ ID NO: 1647, SEQ ID NO: 1609, SEQ ID NO: 1621, SEQ ID NO: 1617, SEQ ID NO: 1654, SEQ ID NO: 1631, SEQ ID NO: 1620, SEQ ID NO: 1637, SEQ ID NO: 1612, SEQ ID NO: 1656, SEQ ID NO: 1619, SEQ ID NO: 1675, SEQ ID NO: 1645, SEQ ID NO: 1598, SEQ ID NO: 1599, SEQ ID NO: 1663, SEQ ID NO: 1677, or SEQ ID NO: 1626.

[0015] In another aspect, the invention provides a gRNA molecule that includes a targeting domain that is complementary with a target sequence of a hereditary persistence of fetal hemoglobin (HPFH) region. In an embodiment, the HPFH region is the French HPFH region. In embodiments, the targeting domain includes, e.g., consists of, any one of SEQ ID NO: 86 to SEQ ID NO: 181 or SEQ ID NO: 1500 to SEQ ID NO: 1595. In embodiments, the targeting domain includes, e.g., consists of, any one of SEQ ID NO: 100, SEQ ID NO: 165, SEQ ID NO: 113, SEQ ID NO: 99, SEQ ID NO: 112, SEQ ID NO: 98, SEQ ID NO: 1580, SEQ ID NO: 106, SEQ ID NO: 1503, SEQ ID NO: 1589, SEQ ID NO: 160, SEQ ID NO: 1537, SEQ ID NO: 159, SEQ ID NO: 101, SEQ ID NO: 162, SEQ ID NO: 104, SEQ ID NO: 138, SEQ ID NO: 1536, SEQ ID NO: 1539, SEQ ID NO: 1585. In embodiments, the targeting domain includes, e.g., consists of, SEQ ID NO: 100. In embodiments, the targeting domain includes, e.g., consists of, SEQ ID NO: 165. In embodiments, the targeting domain includes, e.g., consists of, SEQ ID NO: 113.

[0016] In any of the aforementioned embodiments, the gRNA molecule may further have regions and/or properties described herein. In an aspect, the gRNA molecule (e.g., of any of the aforementioned aspects or embodiments) includes a targeting domain that includes, e.g., consists of, 17, 18, 19, 20, 21, 22, 23, or 24 consecutive nucleic acids of any one of the recited targeting domain sequences. In embodiments, the 17, 18, 19, 20, 21, 22, 23, or 24 consecutive nucleic acids of any one of the recited targeting domain sequences are the 17, 18, 19, 20, 21, 22, 23, or 24 consecutive nucleic acids disposed at the 3′ end of the recited targeting domain sequence. In embodiments, the 17, 18, 19, 20, 21, 22, 23, or 24 consecutive nucleic acids of any one of the recited targeting domain sequences are the 17, 18, 19, 20, 21, 22, 23, or 24 consecutive nucleic acids disposed at the 5′ end of the recited targeting domain sequence. In embodiments, the 17, 18, 19, 20, 21, 22, 23, or 24 consecutive nucleic acids of any one of the recited targeting domain sequences do not include either the 5′ or 3′ nucleic acid of the recited targeting domain sequence. In any of the aforementioned aspects or embodiments, the targeting domain may consist of the recited targeting domain sequence.

[0017] In embodiments of the gRNA molecule, including in any of the aforementioned aspects and embodiments, the targeting domain includes 17, 18, 19, 20, 21 (if present in the reference sequence), 22 (if present in the reference sequence), 23 (if present in the reference sequence), 24 (if present in the reference sequence), or 25 (if present in the reference sequence) consecutive nucleic acids of any one of the recited targeting domain sequences. In other embodiments of the gRNA molecule, including in any of the aforementioned aspects and embodiments, the targeting domain consists of 17, 18, 19, 20, 21 (if present in the reference sequence), 22 (if present in the reference sequence), 23 (if present in the reference sequence), or 24 (if present in the reference sequence), or 25 (if present in the reference sequence) consecutive nucleic acids of any one of the recited targeting domain sequences. In embodiments of the gRNA molecule, including in any of the aforementioned aspects and embodiments, the 17, 18, 19, 20, 21 (if present in the reference sequence), 22 (if present in the reference sequence), 23 (if present in the reference sequence), or 24 (if present in the reference sequence), or 25 (if present in the reference sequence) consecutive nucleic acids of any one of the recited targeting domain sequences are the 17, 18, 19, 20, 21 (if present in the reference sequence), 22 (if present in the reference sequence), 23 (if present in the reference sequence), or 24 (if present in the reference sequence), or 25 (if present in the reference sequence) consecutive nucleic acids disposed at the 3′ end of the recited targeting domain sequence. In other embodiments of the gRNA molecule, including in any of the aforementioned aspects and embodiments, the 17, 18, 19, 20, 21 (if present in the reference sequence), 22 (if present in the reference sequence), 23 (if present in the reference sequence), or 24 (if present in the reference sequence), or 25 (if present in the reference sequence) consecutive nucleic acids of any one of the recited targeting domain sequences are the 17, 18, 19, 20, 21 (if present in the reference sequence), 22 (if present in the reference sequence), 23 (if present in the reference sequence), or 24 (if present in the reference sequence), or 25 (if present in the reference sequence) consecutive nucleic acids disposed at the 5′ end of the recited targeting domain sequence. In other embodiments of the gRNA molecule, including in any of the aforementioned aspects and embodiments, the 17, 18, 19, 20, 21 (if present in the reference sequence), 22 (if present in the reference sequence), 23 (if present in the reference sequence), or 24 (if present in the reference sequence), or 25 (if present in the reference sequence) consecutive nucleic acids of any one of the recited targeting domain sequences do not include either the 5′ or 3′ nucleic acid of the recited targeting domain sequence.

[0018] In an aspect, including in any of the aforementioned aspects or embodiments, the gRNA molecule includes a portion of the crRNA and a portion of the tracr that hybridize to form a flagpole, that includes SEQ ID NO: 6584 or 6585. In embodiments, the flagpole further includes a first flagpole extension, located 3′ to the crRNA portion of the flagpole, wherein said first flagpole extension includes SEQ ID NO: 6586. In embodiments, the flagpole further includes a second flagpole extension located 3′ to the crRNA portion of the flagpole and, if present, the first flagpole extension, wherein said second flagpole extension includes SEQ ID NO: 6587.

[0019] In an aspect, including in any of the aforementioned aspects or embodiments, the invention provides a gRNA molecule that includes a tracr that includes, e.g., consists of, SEQ ID NO: 6660 or SEQ ID NO: 6661. In embodiments, the crRNA portion of the flagpole includes SEQ ID NO: 6607 or SEQ ID NO: 6608.

[0020] In an aspect, including in any of the aforementioned aspects or embodiments, the invention provides a gRNA molecule that includes a tracr that includes SEQ ID NO: 6589 or 6590, and optionally, if a first flagpole extension is present, a first tracr extension, disposed 5′ to SEQ ID NO: 6589 or 6590, said first tracr extension including SEQ ID NO: 6591.

[0021] In an aspect, including in any of the aforementioned aspects or embodiments, the invention provides a gRNA molecule wherein the targeting domain and the tracr are disposed on separate nucleic acid molecules (e.g., a dgRNA molecule).

[0022] In an aspect, including in any of the aforementioned aspects or embodiments, the invention provides a gRNA molecule wherein the targeting domain and the tracr are disposed on a single nucleic acid molecule (e.g., a sgRNA molecule), and wherein the tracr is disposed 3′ to the targeting domain. In embodiments, the sgRNA molecule includes a loop, disposed 3′ to the targeting domain and 5′ to the tracr, e.g., a loop including, e.g., consisting of, SEQ ID NO: 6588.

[0023] In an aspect, including in any of the aforementioned aspects or embodiments, the invention provides a gRNA molecule including, from 5′ to 3′, [targeting domain]—:
[0024] (a) SEQ ID NO: 6601;
[0025] (b) SEQ ID NO: 6602;
[0026] (c) SEQ ID NO: 6603;
[0027] (d) SEQ ID NO: 6604; or
[0028] (e) any of (a) to (d), above, further including, at the 3′ end, 1, 2, 3, 4, 5, 6 or 7 uracil (U) nucleotides, e.g., 4 uracil nucleotides. In embodiments, there are no intervening nucleotides between the targeting domain and the sequence of any of (a)-(e).

[0029] In another aspect, the invention provides CRISPR systems, e.g., Cas CRISPR systems, e.g., Cas9 CRISPR systems, e.g., S. pyogenes Cas9 CRISPR systems, the include one or more, e.g., one, gRNA molecule of any of the aforementioned aspects and embodiments. In an aspect, the invention provides a composition including a first gRNA molecule of any of the aforementioned aspects and embodiments, further including a Cas9 molecule. In embodiments, the Cas9 molecule is an active or inactive s. pyogenes Cas9. In embodiments, the first gRNA molecule and Cas9 molecule are present in a ribonuclear protein complex (RNP).

[0030] In another aspect, the invention provides compositions that include more than one gRNA, e.g., more than one gRNA molecule as described herein, e.g., more than one gRNA molecule of any of the aforementioned gRNA molecule aspects or embodiments. Thus, in a further aspect, the invention provides a composition of any of the aforementioned composition aspects and embodiments, further including a second gRNA molecule; a second gRNA molecule and a third gRNA molecule; or a second gRNA molecule, a third gRNA molecule, and a fourth gRNA molecule, wherein the second gRNA molecule, the third gRNA molecule (if present), and the fourth gRNA molecule (if present) are a gRNA molecule as described herein, e.g., a gRNA molecule of any of the aforementioned gRNA molecule aspects or embodiments. In an embodiment, each gRNA molecule of the composition is complementary to a different target sequence. In an embodiment, each gRNA molecule is complementary to target sequences within the same gene or region. In an aspect, the first gRNA molecule, the second gRNA molecule, the third gRNA molecule (if present), and the fourth gRNA molecule (if present) are complementary to target sequences not more than 20000 nucleotides, not more than 10000 nucleotides, not more than 6000, not more than 5000 nucleotides, not more than 4000, not more than 1000 nucleotides, not more than 500 nucleotides, not more than 400 nucleotides, not more than 300 nucleotides, not more than 200 nucleotides, not more than 100 nucleotides, not more than 90 nucleotides, not more than 80 nucleotides, not more than 70 nucleotides, not more than 60 nucleotides, not more than 50 nucleotides, not more than 40 nucleotides, not more than 30 nucleotides, not more than 20 nucleotides or not more than 10 nucleotides apart. In another aspect, each gRNA molecule of the composition is complementary to target sequence within a different gene or region.

[0031] Specific and preferred combinations of more than one gRNA molecule of the invention are described herein. In an aspect, the composition includes a first gRNA molecule and a second gRNA molecule, wherein the first gRNA molecule and second gRNA molecule are complementary to different target sequences, and are:
[0032] (a) independently selected from the gRNA molecules described herein (e.g., above) to the BCL11a gene;
[0033] (b) independently selected from the gRNA molecules described herein (e.g., above) to the +58 BCL11a enhancer;
[0034] (c) independently selected from the gRNA molecules described herein (e.g., above) to the +62 BCL11a enhancer;
[0035] (d) independently selected from the gRNA molecules described herein (e.g., above) to the +55 BCL11a enhancer; or
[0036] (e) independently selected from the gRNA molecules described herein (e.g., above) to a HPFH region.

[0037] In an aspect, the composition includes a first gRNA molecule and a second gRNA molecule, wherein the first gRNA molecule and second gRNA molecule are complementary to different target sequences, and:
[0038] (a) the first gRNA molecule is selected from the gRNA molecules described herein (e.g., above) to the BCL11a gene, and the second gRNA molecule is selected from the gRNA molecules described herein (e.g., above) to the +58 BCL11a enhancer;
[0039] (b) the first gRNA molecule is selected from the gRNA molecules described herein (e.g., above) to the BCL11a gene, and the second gRNA molecule is selected from the gRNA molecules described herein (e.g., above) to the +62 BCL11a enhancer;
[0040] (c) the first gRNA molecule is selected from the gRNA molecules described herein (e.g., above) to the BCL11a gene, and the second gRNA molecule is selected from the gRNA molecules described herein (e.g., above) to the +55 BCL11a enhancer;
[0041] (d) the first gRNA molecule is selected from the gRNA molecules described herein (e.g., above) to the BCL11a gene, and the second gRNA molecule is selected from the gRNA molecules described herein (e.g., above) to a HPFH region;
[0042] (e) the first gRNA molecule is selected from the gRNA molecules described herein (e.g., above) to the +58 BCL11a enhancer, and the second gRNA molecule is selected from the gRNA molecules described herein (e.g., above) to the +62 BCL11a enhancer;
[0043] (f) the first gRNA molecule is selected from the gRNA molecules described herein (e.g., above) to the +58 BCL11a enhancer, and the second gRNA molecule is selected from the gRNA molecules described herein (e.g., above) to the +55 BCL11a enhancer;
[0044] (g) the first gRNA molecule is selected from the gRNA molecules described herein (e.g., above) to the +58 BCL11a enhancer, and the second gRNA molecule is selected from the gRNA molecules described herein (e.g., above) to a HPFH region;
[0045] (h) the first gRNA molecule is selected from the gRNA molecules described herein (e.g., above) to the +62 BCL11a enhancer, and the second gRNA molecule is selected from the gRNA molecules described herein (e.g., above) to the +55 BCL11a enhancer;
[0046] (i) the first gRNA molecule is selected from the gRNA molecules described herein (e.g., above) to the +62 BCL11a enhancer, and the second gRNA molecule is selected from the gRNA molecules described herein (e.g., above) to a HPFH region;
[0047] (j) the first gRNA molecule is selected from the gRNA molecules described herein (e.g., above) to the +55 BCL11a enhancer, and the second gRNA molecule is selected from the gRNA molecules described herein (e.g., above) to a HPFH region; In another aspect, the composition that includes a first gRNA molecule and a second gRNA molecule, includes:
[0048] (a) a first gRNA molecule that is selected from the gRNA molecules described herein (e.g., above) to a HPFH region, and a second gRNA molecule includes a targeting domain that is complementary to a target sequence of the beta globin gene; or
[0049] (b) a first gRNA molecule that is selected from the gRNA molecules described herein (e.g., above) to a BCL11a enhancer, e.g., a +58 BCL11a enhancer, a +55 BCL11a enhancer or a +62 BCL11a enhancer, and a second gRNA molecule includes a targeting domain that is complementary to a target sequence of the beta globin gene.

[0050] In any of the aforementioned composition aspects and embodiments, the composition may consist of, with respect to the gRNA components of the composition, a first gRNA molecule and a second gRNA molecule.

[0051] In any of the aforementioned composition aspects and embodiments, the compositions may be formulated in a medium suitable for electroporation.

[0052] In another aspect, the invention provides nucleic acids encoding the gRNA molecule(s) and/or Cas molecules of the CRISPR systems. Without being bound by theory, it is believed that delivering such nucleic acids to cells will lead to the expression of the CRISPR system within the cell. In an aspect, the invention provides a nucleic acid sequence that encodes one or more gRNA molecules of any of the previous gRNA aspects and embodiments. In embodiments, the nucleic acid includes a promoter operably linked to the sequence that encodes the one or more gRNA molecules. In embodiments, the promoter is a promoter recognized by an RNA polymerase II or RNA polymerase III. In embodiments, the promoter is a U6 promoter or an HI promoter.

[0053] In further aspects, the nucleic acid further comprises sequence encoding a Cas9 molecule. In embodiments, the nucleic acid includes a promoter operably linked to the sequence that encodes a Cas9 molecule. In embodiments, the promoter is an EF-1 promoter, a CMV IE gene promoter, an EF-1α promoter, an ubiquitin C promoter, or a phosphoglycerate kinase (PGK) promoter.

[0054] In an aspect the invention provides a vector that includes the nucleic acid of any of the previous nucleic acid aspects and embodiments. In embodiments, the vector is selected from the group consisting of a lentiviral vector, an adenoviral vector, an adeno-associated viral (AAV) vector, a herpes simplex virus (HSV) vector, a plasmid, a minicircle, a nanoplasmid, and an RNA vector.

[0055] In another aspect, the invention provides a composition including one or more gRNA molecules, e.g., as described herein, e.g., in any of the previous gRNA molecule aspects and embodiments, and nucleic acid encoding a Cas9 molecule.

[0056] In another aspect, the invention provides a composition including nucleic acid encoding one or more gRNA molecules (e.g., as described herein, e.g., of any of the previous gRNA molecule aspects and embodiments), and a Cas9 molecule.

[0057] In another aspect, the invention provides a composition, e.g., a composition of any of the aforementioned composition aspects and embodiments, further including a template nucleic acid. In another aspect, the invention provides a composition, e.g., a composition of any of the aforementioned composition aspects and embodiments, further including nucleic acid sequence encoding a template nucleic acid. In embodiments, the template nucleic acid includes a nucleotide that corresponds to a nucleotide of a target sequence of the gRNA molecule. In embodiments, the template nucleic acid includes nucleic acid encoding human beta globin, e.g., human beta globin including one or more of the mutations G16D, E22A and T87Q. In embodiments, the template nucleic acid includes nucleic acid encoding human gamma globin.

[0058] In another aspect, the invention provides cells that include (or at any time included) a gRNA molecule, CRISPR system, composition or nucleic acid (e.g., as described herein, e.g., as in any of the aforementioned aspects and embodiments). In such aspects, the invention provides cells that have been modified by such inclusion.

[0059] Thus, in an aspect, the invention provides a method of altering e.g., altering the structure, e.g., sequence, of a target sequence within nucleic acid of a cell, including contacting said cell with:
[0060] 1) one or more gRNA molecules of any of the aforementioned gRNA molecule aspects and embodiments, and a Cas9 molecule (e.g., as described herein);
[0061] 2) one or more gRNA molecules of any of the aforementioned gRNA molecule aspects and embodiments, and nucleic acid encoding a Cas9 molecule (e.g., as described herein);
[0062] 3) nucleic acid encoding one or more gRNA molecules of any of the aforementioned gRNA molecule aspects and embodiments, and a Cas9 molecule (e.g., as described herein);
[0063] 4) nucleic acid encoding one or more gRNA molecules of the aforementioned gRNA molecule aspects and embodiments, and nucleic acid encoding a Cas9 molecule (e.g., as described herein); or
[0064] 5) any of 1) to 4), above, and a template nucleic acid (e.g., as described herein); 6) any of 1) to 4) above, and nucleic acid including sequence encoding a template nucleic acid (e.g., as described herein);
[0065] 7) a composition as described herein (e.g., of any of the aforementioned composition aspects and embodiments); or
[0066] 8) the vector of any of the aforementioned vector aspects and embodiments.

[0067] In embodiments, the gRNA molecule or nucleic acid encoding the gRNA molecule, and the Cas9 molecule or nucleic acid encoding the Cas9 molecule, are formulated in a single composition. In other embodiments, the gRNA molecule or nucleic acid encoding the gRNA molecule, and the Cas9 molecule or nucleic acid encoding the Cas9 molecule, are formulated in more than one composition. In embodiments, the more than one composition are delivered simultaneously or sequentially.

[0068] In embodiments, the cell is an animal cell. In embodiments, the cell the cell is a mammalian, primate, or human cell. In embodiments, the cell is a hempatopoietic stem or progenitor cell (HSPC) (e.g., a population of HSPCs). In embodiments, the cell is a CD34+ cell. In embodiments, the cell is a CD34+/CD38−/CD90+/CD45RA− cell. In embodiments, the cell is a CD34+/CD90+/CD49f+ cell. In embodiments, the cell is a CD34+/CD38−/CD90+/CD45RA−/CD49f+ cell. In embodiments, the method includes a population of cells that has been enriched for HSPCs, e.g., for CD34+ cells.

[0069] In embodiments, the cell (e.g. population of cells) has been isolated from bone marrow. In embodiments, the cell (e.g. population of cells) has been isolated from mobilized peripheral blood. In embodiments, the cell (e.g. population of cells) has been isolated from umbilical cord blood.

[0070] In embodiments, the cell (e.g. population of cells) is autologous with respect to a patient to be administered said cell (e.g. population of cells). In embodiments, the cell (e.g. population of cells) is allogeneic with respect to a patient to be administered said cell (e.g. population of cells).

[0071] In embodiments, of the methods described herein, the altering results in an increase of fetal hemoglobin expression in the cell. In embodiments, of the methods described herein, the altering results in a reduction of fetal hemoglobin expression in the cell.

[0072] In another aspect, the invention provides a cell, altered by the method of any of the aforementioned method aspects and embodiments. In another aspect, the invention provides a cell, including a first gRNA molecule (e.g., as described herein), or a composition (e.g., as described herein), or a nucleic acid encoding the first gRNA molecule (e.g., as described herein), of any of the previous aspects and embodiments. In embodiments, the cell is an animal cell. In embodiments, the cell the cell is a mammalian, primate, or human cell. In embodiments, the cell is a hematopoietic stem or progenitor cell (HSPC) (e.g., a population of HSPCs). In embodiments, the cell is a CD34+ cell. In embodiments, the cell is a CD34+/CD38−/CD90+/CD45RA− cell. In embodiments, the cell is a CD34+/CD90+/CD49f+ cell. In embodiments, the method includes a population of cells that has been enriched for HSPCs, e.g., for CD34+ cells.

[0073] In embodiments, the cell (e.g. population of cells) has been isolated from bone marrow. In embodiments, the cell (e.g. population of cells) has been isolated from mobilized peripheral blood. In embodiments, the cell (e.g. population of cells) has been isolated from umbilical cord blood.

[0074] In embodiments, the cell (e.g. population of cells) is autologous with respect to a patient to be administered said cell (e.g. population of cells). In embodiments, the cell (e.g. population of cells) is allogeneic with respect to a patient to be administered said cell (e.g. population of cells).

[0075] In embodiments, the cell includes, has included, or will include a second gRNA molecule, e.g., as described herein, e.g., of any of the previous gRNA molecule aspects and embodiments, or a nucleic acid encoding the second gRNA molecule, wherein the first gRNA molecule and second gRNA molecule include nonidentical targeting domains.

[0076] In embodiments, expression of fetal hemoglobin is increased in the cell, e.g., relative to a cell of the same cell type that has not been modified to include a gRNA molecule (e.g., as described herein). In embodiments, expression of beta globin is decreased in the cell, e.g., relative to a cell of the same cell type that has not been modified to include a gRNA molecule (e.g., as described herein). In embodiments, expression of fetal hemoglobin is increased and expression of beta globin is decreased in the cell, e.g., relative to a cell of the same cell type that has not been modified to include a gRNA molecule (e.g., as described herein).

[0077] In an aspect, the cells of the invention (or methods comprising a cell) have been contacted with a stem cell expander, e.g., as described herein, e.g., compound 1, compound 2, compound 3 or compound 4. In an aspect, the cells of the invention (or methods comprising a cell) have been contacted with a stem cell expander, e.g., as described herein, e.g., compound 1, compound 2, compound 3, compound 4 or a combination thereof (e.g., compound 1 and compound 4). In an embodiment, the stem cell expander is compound 4. In an embodiment, the stem cell expander is a combination of compound 1 and compound 4. In embodiments, the contacting is ex vivo.

[0078] In another aspect, the invention provides methods of treatment, e.g., methods of treatment of hemoglobinopathies. In an aspect, the invention provides a method of treating a hemoglobinopathy, that includes administering to a patient a cell (e.g., a population of cells) of any of the previous cell or method aspects and embodiments.

[0079] In another aspect, the invention provides a method of increasing fetal hemoglobin expression in a mammal, including administering to a patient a cell of any of the previous cell or method aspects and embodiments. In an embodiment, the hemoglobinopathy is beta-thalassemia or sickle cell disease.

[0080] In another aspect, the invention provides a guide RNA molecule, e.g., as described herein, for use as a medicament, e.g., for use in the treatment of a disease. In embodiments, the disease is a hemoglobinopathy, e.g., beta-thalassemia or sickle cell disease.

[0081] In another aspect, the invention provides a gRNA molecule, e.g., as described herein, e.g., as described in any of the aforementioned gRNA molecule aspects and embodiments, wherein when a CRISPR system including the gRNA is introduced into a cell (e.g., a CD34+ cell, e.g., an HSC), at least about 15% of the indels produced include (a) a frameshift mutation; or (b) a large deletion, relative to unmodified target DNA, as measured by NGS. In embodiments, at least about 25% of the indels produced include (a) a frameshift mutation; or (b) a large deletion, relative to unmodified target DNA, as measured by NGS. In embodiments, at least about 40%, at least about 50%, at least about 60%, at least about 70% at least about 80%, at least about 90%, at least about 95%, at least about 96%, at least about 97%, at least about 98%, or at least about 99% of the indels produced include (a) a frameshift mutation; or (b) a large deletion, relative to unmodified target DNA, as measured by NGS.

[0082] In another aspect, the invention provides methods for the ex vivo expansion and modification of HSPCs (e.g., CD34+ cells). In an aspect, the invention provides a method of modifying cells (e.g., a population of cells) including:
[0083] (a) providing a population of cells;
[0084] (b) expanding said cells ex vivo in the presence of a stem cell expander; and
[0085] (c) introducing into said cells a first gRNA molecule (e.g., as described herein, e.g., of any of the aforementioned gRNA molecule aspects and embodiments), a nucleic acid molecule encoding the first gRNA molecule, or a composition (e.g., as described herein, e.g., of any of the aforementioned composition aspects and embodiments);
[0086] such that hemoglobin, e.g., fetal hemoglobin, expression is increased in said cells relative to the same cell type which have not been subjected to step (c).

[0087] In embodiments, the cells are introduced into a subject in need thereof, e.g., a subject that has a hemoglobinopathy, e.g., sickle cell disease or beta thalassemia.

[0088] In embodiments, the cells are or comprise CD34+ cells. In embodiments, the cells are or comprise HSPCs. In embodiments, the cells are isolated from bone marrow, mobilized peripheral blood or umbilical cord blood. In a preferred embodiment, the cells are isolated from bone marrow. In other embodiments, the cells are isolated from mobilized peripheral blood. In aspects, the mobilized peripheral blood is isolated from a subject who has been administered a G-CSF. In aspects, the mobilized peripheral blood is isolated from a subject who has been administered a mobilization agent other than G-CSF, for example, Plerixafor® (AMD3100). In embodiments, the cells are an enriched population of cells.

[0089] In embodiments, the stem cell expander is compound 1, compound 2, compound 3, or compound 4, e.g., compound 4. In embodiments, the stem cell expander is compound 1, compound 2, compound 3, compound 4, or a combination thereof (e.g., a combination of compound 1 and compound 4). In embodiments, the cells are contacted with compound 4 at a concentration of from about 1 to about 200 micromolar (uM). In an embodiment, the concentration of compound 4 is about 75 micromolar (uM). In embodiments, the expanding said cells ex vivo in the presence of a stem cell expander occurs for a period of about 1-10 days, e.g., about 1-5 days, e.g., about 2-5 days, e.g., about 4 days.

[0090] In embodiments, the cells are autologous to a patient intended to be administered said cells. In embodiments, the cells are allogeneic to a patient intended to be administered said cells.

[0091] In embodiments, the expanding of step (b) is further in the presence of thrombopoietin (Tpo), Flt3 ligand (Flt-3L), human stem cell factor (SCF) and human interleukin-6 (IL-6). In embodiments, the thrombopoietin (Tpo), Flt3 ligand (Flt-3L), human stem cell factor (SCF) and human interleukin-6 (IL-6) are each at a concentration of about 50 ng/mL. In embodiments, the thrombopoietin (Tpo), Flt3 ligand (Flt-3L), human stem cell factor (SCF) and human interleukin-6 (IL-6) are each at a concentration of 50 ng/mL.

[0092] Additional aspects and embodiments are described below.

[0093] In an aspect, the invention provides a gRNA molecule that includes a tracr and crRNA, wherein the crRNA includes a targeting domain that is complementary with a target sequence of a BCL11A gene (e.g., a human BCL11a gene), a BCL11a enhancer (e.g., a human BCL11a enhancer), or a HFPH region (e.g., a human HPFH region).

[0094] In embodiments, the target sequence is of the BCL11A gene, and the targeting domain includes, e.g., consists of, any one of SEQ ID NO: 1 to SEQ ID NO: 85 or SEQ ID NO: 400 to SEQ ID NO: 1231. These embodiments are referred to herein as gRNA molecule embodiment 2.

[0095] In other embodiments, the target sequence is of a BCL11a enhancer, and the targeting domain includes, e.g., consists of, any one of SEQ ID NO: 1232 to SEQ ID NO: 1499. These embodiments are referred to herein as gRNA molecule embodiment 3. In preferred embodiments, the target sequence is of a BCL11a enhancer, and the targeting domain includes, e.g., consists of, any one of SEQ ID NO: 182 to SEQ ID NO: 277 or SEQ ID NO: 334 to SEQ ID NO: 341. These embodiments are referred to herein as gRNA molecule embodiment 4. In more preferred embodiments, the targeting domain includes, e.g., consists of, any one of SEQ ID NO: 341, SEQ ID NO: 246, SEQ ID NO: 248, SEQ ID NO: 247, SEQ ID NO: 245, SEQ ID NO: 249, SEQ ID NO: 244, SEQ ID NO: 199, SEQ ID NO: 251, SEQ ID NO: 250, SEQ ID NO: 334, SEQ ID NO: 185, SEQ ID NO: 186, SEQ ID NO: 336, or SEQ ID NO: 337. These embodiments are referred to herein as gRNA molecule embodiment 5. In still more preferred embodiments, the targeting domain includes, e.g., consists of, any one of SEQ ID NO: 247, SEQ ID NO: 248, SEQ ID NO: 335, SEQ ID NO: 336, SEQ ID NO: 337, or SEQ ID NO: 338 (referred to herein as gRNA molecule embodiment 6), for example, includes, e.g., consists of, any one of SEQ ID NO: 248 or SEQ ID NO: 338 (referred to herein as gRNA molecule embodiment 7). In embodiments, the targeting domain includes, e.g., consists of, SEQ ID NO: 248 (referred to herein as gRNA molecule embodiment 8). In embodiments, the targeting domain includes, e.g., consists of, SEQ ID NO: 338 (referred to herein as gRNA molecule embodiment 9).

[0096] In other embodiments, the target sequence is of a BCL11a enhancer, and the targeting domain includes, e.g., consists of, any one of SEQ ID NO: 278 to SEQ ID NO: 333 (referred to herein as gRNA molecule embodiment 10). In preferred embodiments, the targeting domain includes, e.g., consists of, any one of SEQ ID NO: 318, SEQ ID NO: 312, SEQ ID NO: 313, SEQ ID NO: 294, SEQ ID NO: 310, SEQ ID NO: 319, SEQ ID NO: 298, SEQ ID NO: 322, SEQ ID NO: 311, SEQ ID NO: 315, SEQ ID NO: 290, SEQ ID NO: 317, SEQ ID NO: 309, SEQ ID NO: 289, or SEQ ID NO: 281 (referred to herein as gRNA molecule embodiment 11). In one preferred embodiment, the targeting domain includes, e.g., consists of, SEQ ID NO: 318 (referred to herein as gRNA molecule embodiment 12).

[0097] In other embodiments, the target sequence is of a BCL11a enhancer, and the targeting domain includes, e.g., consists of, any one of SEQ ID NO: 1596 to SEQ ID NO: 1691 (referred to herein as gRNA molecule embodiment 13). In preferred embodiments, the targeting domain includes, e.g., consists of, any one of SEQ ID NO: 1683, SEQ ID NO: 1638, SEQ ID NO: 1647, SEQ ID NO: 1609, SEQ ID NO: 1621, SEQ ID NO: 1617, SEQ ID NO: 1654, SEQ ID NO: 1631, SEQ ID NO: 1620, SEQ ID NO: 1637, SEQ ID NO: 1612, SEQ ID NO: 1656, SEQ ID NO: 1619, SEQ ID NO: 1675, SEQ ID NO: 1645, SEQ ID NO: 1598, SEQ ID NO: 1599, SEQ ID NO: 1663, SEQ ID NO: 1677, or SEQ ID NO: 1626 (referred to herein as gRNA molecule embodiment 14).

[0098] In other embodiments, the target sequence is of a HFPH region (e.g., a French HPFH region), and the targeting domain includes, e.g., consists of, any one of SEQ ID NO: 86 to SEQ ID NO: 181, SEQ ID NO: 1500 to SEQ ID NO: 1595, or SEQ ID NO: 1692 to SEQ ID NO: 1761 (referred to herein as gRNA molecule embodiment 15). In preferred embodiments, the targeting domain includes, e.g., consists of, any one of SEQ ID NO: 100, SEQ ID NO: 165, SEQ ID NO: 113, SEQ ID NO: 99, SEQ ID NO: 112, SEQ ID NO: 98, SEQ ID NO: 1580, SEQ ID NO: 106, SEQ ID NO: 1503, SEQ ID NO: 1589, SEQ ID NO: 160, SEQ ID NO: 1537, SEQ ID NO: 159, SEQ ID NO: 101, SEQ ID NO: 162, SEQ ID NO: 104, SEQ ID NO: 138, SEQ ID NO: 1536, SEQ ID NO: 1539, SEQ ID NO: 1585 (referred to herein as gRNA molecule embodiment 16). In still more preferred embodiments, the targeting domain includes, e.g., consists of, any one of SEQ ID NO: 98, SEQ ID NO: 100, SEQ ID NO: 1505, SEQ ID NO: 1589, SEQ ID NO: 1700, or SEQ ID NO: 1750 (referred to herein as gRNA molecule embodiment 17). In other preferred embodiments, the targeting domain includes, e.g., consists of, any one of SEQ ID NO: 100, SEQ ID NO: 165, or SEQ ID NO: 113 (referred to herein as gRNA molecule embodiment 18).

[0099] In embodiments, the gRNA molecule includes a targeting domain that includes, e.g., consists of, 17, 18, 19, 20, 21, 22, 23, or 24, preferably 20, consecutive nucleic acids of any targeting domain sequence described herein, for example a targeting domain sequence of Table 1 or Table 2. In embodiments, the 17, 18, 19, 20, 21, 22, 23, or 24, preferably 20, consecutive nucleic acids of any one of targeting domain sequences described herein, for example a targeting domain sequence of Table 1 or Table 2, are the 17, 18, 19, 20, 21, 22, 23, or 24, preferably 20, consecutive nucleic acids disposed at the 3′ end of the recited targeting domain sequence. In other embodiments, the 17, 18, 19, 20, 21, 22, 23, or 24, preferably 20, consecutive nucleic acids of any one of the targeting domain sequences described herein, for example a targeting domain sequence of Table 1 or Table 2, are the 17, 18, 19, 20, 21, 22, 23, or 24, preferably 20, consecutive nucleic acids disposed at the 5′ end of the recited targeting domain sequence. In other embodiments, the 17, 18, 19, 20, 21, 22, 23, or 24, preferably 20, consecutive nucleic acids of any one of the targeting domain sequences described herein, for example a targeting domain sequence of Table 1 or Table 2, do not include either the 5′ or 3′ nucleic acid of the recited targeting domain sequence.

[0100] In embodiments, the gRNA molecule includes a targeting domain that includes, e.g., consists of, 17, 18, 19, or 20, preferably 20, consecutive nucleic acids of any targeting domain sequence described herein, for example a targeting domain sequence of Table 5, Table 6, Table 7, Table 8 or Table 9. In embodiments, the 17, 18, 19, or 20, preferably 20, consecutive nucleic acids of any one of targeting domain sequences described herein, for example a targeting domain sequence of Table 5, Table 6, Table 7, Table 8 or Table 9, are the 17, 18, 19, or 20, preferably 20, consecutive nucleic acids disposed at the 3′ end of the recited targeting domain sequence. In other embodiments, the 17, 18, 19, or 20, preferably 20, consecutive nucleic acids of any one of the targeting domain sequences described herein, for example a targeting domain sequence of Table 5, Table 6, Table 7, Table 8 or Table 9, are the 17, 18, 19, or 20, preferably 20, consecutive nucleic acids disposed at the 5′ end of the recited targeting domain sequence. In other embodiments, the 17, 18, 19, or 20, preferably 20, consecutive nucleic acids of any one of the targeting domain sequences described herein, for example a targeting domain sequence of Table 5, Table 6, Table 7, Table 8 or Table 9, do not include either the 5′ or 3′ nucleic acid of the recited targeting domain sequence.

[0101] The following aspects describe features of the gRNA molecule that may be combined with any of the aforementioned aspects and embodiments. In embodiments, the gRNA molecule, including the gRNA molecule of any of the aforementioned aspects and embodiments, include a portion of the crRNA and a portion of the tracr that hybridize to form a flagpole that includes SEQ ID NO: 6584 or 6585. In embodiments, the flagpole further includes a first flagpole extension, located 3′ to the crRNA portion of the flagpole, wherein said first flagpole extension includes SEQ ID NO: 6586. In embodiments, the flagpole further includes (in addition to or in alternative to the first flagpole extension) a second flagpole extension located 3′ to the crRNA portion of the flagpole and, if present, the first flagpole extension, wherein said second flagpole extension includes SEQ ID NO: 6587.

[0102] In embodiments, including in any of the aforementioned aspects and embodiments, the tracr includes SEQ ID NO: 6660 or SEQ ID NO: 6661. In embodiments, the tracr includes SEQ ID NO: 7812, optionally further including, at the 3′ end, an additional 1, 2, 3, 4, 5, 6, or 7 uracil (U) nucleotides. In embodiments, the crRNA includes, from 5′ to 3′, [targeting domain]—: a) SEQ ID NO: 6584; b) SEQ ID NO: 6585; c) SEQ ID NO: 6605; d) SEQ ID NO: 6606; e) SEQ ID NO: 6607; f) SEQ ID NO: 6608; or g) SEQ ID NO: 7806.

[0103] In embodiments, including in any of the aforementioned aspects and embodiments, the tracr includes, from 5′ to 3′: a) SEQ ID NO: 6589; b) SEQ ID NO: 6590; c) SEQ ID NO: 6609; d) SEQ ID NO: 6610; e) SEQ ID NO: 6660; f) SEQ ID NO: 6661; g) SEQ ID NO: 7812; h) SEQ ID NO: 7807; i) SEQ ID NO: 7808; j) SEQ ID NO: 7809; k) any of a) to j), above, further including, at the 3′ end, at least 1, 2, 3, 4, 5, 6 or 7 uracil (U) nucleotides, e.g., 1, 2, 3, 4, 5, 6, or 7 uracil (U) nucleotides; l) any of a) to k), above, further including, at the 3′ end, at least 1, 2, 3, 4, 5, 6 or 7 adenine (A) nucleotides, e.g., 1, 2, 3, 4, 5, 6, or 7 adenine (A) nucleotides; or m) any of a) to l), above, further including, at the 5′ end (e.g., at the 5′ terminus), at least 1, 2, 3, 4, 5, 6 or 7 adenine (A) nucleotides, e.g., 1, 2, 3, 4, 5, 6, or 7 adenine (A) nucleotides.

[0104] In embodiments, the targeting domain and the tracr are disposed on separate nucleic acids molecules. In embodiments of such gRNA molecules, the nucleic acid molecule including the targeting domain includes SEQ ID NO: 6607, optionally disposed immediately 3′ to the targeting domain, and the nucleic acid molecule including the tracr includes, e.g., consists of, SEQ ID NO: 6660.

[0105] In embodiments, the crRNA portion of the flagpole includes SEQ ID NO: 6607 or SEQ ID NO: 6608.

[0106] In embodiments, the tracr includes SEQ ID NO: 6589 or 6590, and optionally, if a first flagpole extension is present, a first tracr extension, disposed 5′ to SEQ ID NO: 6589 or 6590, said first tracr extension including SEQ ID NO: 6591.

[0107] In embodiments, including in embodiments of any of the aforementioned aspects and embodiments, the targeting domain and the tracr are disposed on separate nucleic acid molecules. In other embodiments, including in embodiments of any of the aforementioned aspects and embodiments, the targeting domain and the tracr are disposed on a single nucleic acid molecule, for example, the tracr is disposed 3′ to the targeting domain.

[0108] In embodiments, when the targeting domain and the tracr are disposed on a single nucleic acid molecule, the gRNA molecule further includes a loop, disposed 3′ to the targeting domain and 5′ to the tracr. In embodiments, the loop includes, e.g., consists of, SEQ ID NO: 6588.

[0109] In embodiments, when the targeting domain and the tracr are disposed on a single nucleic acid molecule, the gRNA molecule includes, from 5′ to 3′, [targeting domain]—: (a) SEQ ID NO: 6601; (b) SEQ ID NO: 6602; (c) SEQ ID NO: 6603; (d) SEQ ID NO: 6604; (e) SEQ ID NO: 7811; or (f) any of (a) to (e), above, further including, at the 3′ end, 1, 2, 3, 4, 5, 6 or 7 uracil (U) nucleotides. In embodiments, the gRNA molecule includes, e.g., consists of, said targeting domain and SEQ ID NO: 7811, optionally disposed immediately 3′ to said targeting domain.

[0110] In embodiments, including in any of the aforementioned aspects and embodiments, each of the nucleic acid residues of the gRNA molecule is an unmodified A, U, G or C nucleic acid residue and unmodified phosphate bonds between each residue of the nucleic acid molecule(s). In other embodiments, including in any of the aforementioned aspects and embodiments, one, or optionally more than one, of the nucleic acid molecules that make up the gRNA molecule includes: a) one or more, e.g., three, phosphorothioate modifications at the 3′ end of said nucleic acid molecule or molecules; b) one or more, e.g., three, phosphorothioate modifications at the 5′ end of said nucleic acid molecule or molecules; c) one or more, e.g., three, 2′-O-methyl modifications at the 3′ end of said nucleic acid molecule or molecules; d) one or more, e.g., three, 2′-O-methyl modifications at the 5′ end of said nucleic acid molecule or molecules; e) a 2′ O-methyl modification at each of the 4^{th}-to-terminal, 3^{rd}-to-terminal, and 2^{nd}-to-terminal 3′ residues of said nucleic acid molecule or molecules; f) a 2′ O-methyl modification at each of the 4^{th}-to-terminal, 3^{rd}-to-terminal, and 2^{nd}-to-terminal 5′ residues of said nucleic acid molecule or molecules; or f) any combination thereof.

[0111] In preferred embodiments, the invention provides a gRNA molecule (e.g., that is a sgRNA molecule) including, e.g., consisting of, the sequence: (a) SEQ ID NO: 342; (b) SEQ ID NO: 343; or (c) SEQ ID NO: 1762 (referred to in this summary of invention as gRNA molecule embodiment 41).

[0112] In other preferred embodiments, the invention provides gRNA molecule (e.g., that is a dual gRNA molecule) including, e.g., consisting of: (a) a crRNA including, e.g., consisting of, SEQ ID NO: 344, and a tracr including, e.g., consisting of, SEQ ID NO: 6660; (b) a crRNA including, e.g., consisting of, SEQ ID NO: 344, and a tracr including, e.g., consisting of, SEQ ID NO: 346; (c) a crRNA including, e.g., consisting of, SEQ ID NO: 345, and a tracr including, e.g., consisting of, SEQ ID NO: 6660; or (d) a crRNA including, e.g., consisting of, SEQ ID NO: 345, and a tracr including, e.g., consisting of, SEQ ID NO: 346 (referred to in this summary of invention as gRNA molecule embodiment 42).

[0113] In other preferred embodiments, the invention provides a gRNA molecule (e.g., that is a sgRNA molecule) including, e.g., consisting of, the sequence: (a) SEQ ID NO: 347; (b) SEQ ID NO: 348; or (c) SEQ ID NO: 1763 (referred to in this summary of invention as gRNA molecule embodiment 43).

[0114] In other preferred embodiments, the invention provides gRNA molecule (e.g., that is a dual gRNA molecule) including, e.g., consisting of: (a) a crRNA including, e.g., consisting of, SEQ ID NO: 349, and a tracr including, e.g., consisting of, SEQ ID NO: 6660; (b) a crRNA including, e.g., consisting of, SEQ ID NO: 349, and a tracr including, e.g., consisting of, SEQ ID NO: 346; (c) a crRNA including, e.g., consisting of, SEQ ID NO: 350, and a tracr including, e.g., consisting of, SEQ ID NO: 6660; or (d) a crRNA including, e.g., consisting of, SEQ ID NO: 350, and a tracr including, e.g., consisting of, SEQ ID NO: 346 (referred to in this summary of invention as gRNA molecule embodiment 44).

[0115] In other preferred embodiments, the invention provides a gRNA molecule (e.g., that is a sgRNA molecule) including, e.g., consisting of, the sequence: (a) SEQ ID NO: 351; (b) SEQ ID NO: 352; or (c) SEQ ID NO: 1764 (referred to in this summary of invention as gRNA molecule embodiment 45).

[0116] In other preferred embodiments, the invention provides gRNA molecule (e.g., that is a dual gRNA molecule) including, e.g., consisting of: (a) a crRNA including, e.g., consisting of, SEQ ID NO: 353, and a tracr including, e.g., consisting of, SEQ ID NO: 6660; (b) a crRNA including, e.g., consisting of, SEQ ID NO: 353, and a tracr including, e.g., consisting of, SEQ ID NO: 346; (c) a crRNA including, e.g., consisting of, SEQ ID NO: 354, and a tracr including, e.g., consisting of, SEQ ID NO: 6660; or (d) a crRNA including, e.g., consisting of, SEQ ID NO: 354, and a tracr including, e.g., consisting of, SEQ ID NO: 346 (referred to in this summary of invention as gRNA molecule embodiment 46).

[0117] In other preferred embodiments, the invention provides a gRNA molecule (e.g., that is a sgRNA molecule) including, e.g., consisting of, the sequence: (a) SEQ ID NO: 355; (b) SEQ ID NO: 356; or (c) SEQ ID NO: 1765 (referred to in this summary of invention as gRNA molecule embodiment 47).

[0118] In other preferred embodiments, the invention provides gRNA molecule (e.g., that is a dual gRNA molecule) including, e.g., consisting of: (a) a crRNA including, e.g., consisting of, SEQ ID NO: 357, and a tracr including, e.g., consisting of, SEQ ID NO: 6660; (b) a crRNA including, e.g., consisting of, SEQ ID NO: 357, and a tracr including, e.g., consisting of, SEQ ID NO: 346; (c) a crRNA including, e.g., consisting of, SEQ ID NO: 358, and a tracr including, e.g., consisting of, SEQ ID NO: 6660; or (d) a crRNA including, e.g., consisting of, SEQ ID NO: 358, and a tracr including, e.g., consisting of, SEQ ID NO: 346 (referred to in this summary of invention as gRNA molecule embodiment 48).

[0119] In other preferred embodiments, the invention provides a gRNA molecule (e.g., that is a sgRNA molecule) including, e.g., consisting of, the sequence: (a) SEQ ID NO: 359; (b) SEQ ID NO: 360; or (c) SEQ ID NO: 1766 (referred to in this summary of invention as gRNA molecule embodiment 49).

[0120] In other preferred embodiments, the invention provides gRNA molecule (e.g., that is a dual gRNA molecule) including, e.g., consisting of: (a) a crRNA including, e.g., consisting of, SEQ ID NO: 361, and a tracr including, e.g., consisting of, SEQ ID NO: 6660; (b) a crRNA including, e.g., consisting of, SEQ ID NO: 361, and a tracr including, e.g., consisting of, SEQ ID NO: 346; (c) a crRNA including, e.g., consisting of, SEQ ID NO: 362, and a tracr including, e.g., consisting of, SEQ ID NO: 6660; or (d) a crRNA including, e.g., consisting of, SEQ ID NO: 362, and a tracr including, e.g., consisting of, SEQ ID NO: 346 (referred to in this summary of invention as gRNA molecule embodiment 50).

[0121] In other preferred embodiments, the invention provides a gRNA molecule (e.g., that is a sgRNA molecule) including, e.g., consisting of, the sequence: (a) SEQ ID NO: 363; (b) SEQ ID NO: 364; or (c) SEQ ID NO: 1767 (referred to in this summary of invention as gRNA molecule embodiment 51).

[0122] In other preferred embodiments, the invention provides gRNA molecule (e.g., that is a dual gRNA molecule) including, e.g., consisting of: (a) a crRNA including, e.g., consisting of, SEQ ID NO: 365, and a tracr including, e.g., consisting of, SEQ ID NO: 6660; (b) a crRNA including, e.g., consisting of, SEQ ID NO: 365, and a tracr including, e.g., consisting of, SEQ ID NO: 346; (c) a crRNA including, e.g., consisting of, SEQ ID NO: 366, and a tracr including, e.g., consisting of, SEQ ID NO: 6660; or (d) a crRNA including, e.g., consisting of, SEQ ID NO: 366, and a tracr including, e.g., consisting of, SEQ ID NO: 346 (referred to in this summary of invention as gRNA molecule embodiment 52).

[0123] In other preferred embodiments, the invention provides a gRNA molecule (e.g., that is a sgRNA molecule) including, e.g., consisting of, the sequence: (a) SEQ ID NO: 367; (b) SEQ ID NO: 368; or (c) SEQ ID NO: 1768 (referred to in this summary of invention as gRNA molecule embodiment 53).

[0124] In other preferred embodiments, the invention provides gRNA molecule (e.g., that is a dual gRNA molecule) including, e.g., consisting of: (a) a crRNA including, e.g., consisting of, SEQ ID NO: 369, and a tracr including, e.g., consisting of, SEQ ID NO: 6660; (b) a crRNA including, e.g., consisting of, SEQ ID NO: 369, and a tracr including, e.g., consisting of, SEQ ID NO: 346; (c) a crRNA including, e.g., consisting of, SEQ ID NO: 370, and a tracr including, e.g., consisting of, SEQ ID NO: 6660; or (d) a crRNA including, e.g., consisting of, SEQ ID NO: 370, and a tracr including, e.g., consisting of, SEQ ID NO: 346 (referred to in this summary of invention as gRNA molecule embodiment 54).

[0125] In other preferred embodiments, the invention provides a gRNA molecule (e.g., that is a sgRNA molecule) including, e.g., consisting of, the sequence: (a) SEQ ID NO: 371; (b) SEQ ID NO: 372; or (c) SEQ ID NO: 1769 (referred to in this summary of invention as gRNA molecule embodiment 55).

[0126] In other preferred embodiments, the invention provides gRNA molecule (e.g., that is a dual gRNA molecule) including, e.g., consisting of: (a) a crRNA including, e.g., consisting of, SEQ ID NO: 373, and a tracr including, e.g., consisting of, SEQ ID NO: 6660; (b) a crRNA including, e.g., consisting of, SEQ ID NO: 373, and a tracr including, e.g., consisting of, SEQ ID NO: 346; (c) a crRNA including, e.g., consisting of, SEQ ID NO: 374, and a tracr including, e.g., consisting of, SEQ ID NO: 6660; or (d) a crRNA including, e.g., consisting of, SEQ ID NO: 374, and a tracr including, e.g., consisting of, SEQ ID NO: 346 (referred to in this summary of invention as gRNA molecule embodiment 56).

[0127] In other preferred embodiments, the invention provides a gRNA molecule (e.g., that is a sgRNA molecule) including, e.g., consisting of, the sequence: (a) SEQ ID NO: 375; (b) SEQ ID NO: 376; or (c) SEQ ID NO: 1770 (referred to in this summary of invention as gRNA molecule embodiment 57).

[0128] In other preferred embodiments, the invention provides gRNA molecule (e.g., that is a dual gRNA molecule) including, e.g., consisting of: (a) a crRNA including, e.g., consisting of, SEQ ID NO: 377, and a tracr including, e.g., consisting of, SEQ ID NO: 6660; (b) a crRNA including, e.g., consisting of, SEQ ID NO: 377, and a tracr including, e.g., consisting of, SEQ ID NO: 346; (c) a crRNA including, e.g., consisting of, SEQ ID NO: 378, and a tracr including, e.g., consisting of, SEQ ID NO: 6660; or (d) a crRNA including, e.g., consisting of, SEQ ID NO: 378, and a tracr including, e.g., consisting of, SEQ ID NO: 346 (referred to in this summary of invention as gRNA molecule embodiment 58).

[0129] In other preferred embodiments, the invention provides a gRNA molecule (e.g., that is a sgRNA molecule) including, e.g., consisting of, the sequence: (a) SEQ ID NO: 379; (b) SEQ ID NO: 380; or (c) SEQ ID NO: 1771 (referred to in this summary of invention as gRNA molecule embodiment 59).

[0130] In other preferred embodiments, the invention provides gRNA molecule (e.g., that is a dual gRNA molecule) including, e.g., consisting of: (a) a crRNA including, e.g., consisting of, SEQ ID NO: 381, and a tracr including, e.g., consisting of, SEQ ID NO: 6660; (b) a crRNA including, e.g., consisting of, SEQ ID NO: 381, and a tracr including, e.g., consisting of, SEQ ID NO: 346; (c) a crRNA including, e.g., consisting of, SEQ ID NO: 382, and a tracr including, e.g., consisting of, SEQ ID NO: 6660; or (d) a crRNA including, e.g., consisting of, SEQ ID NO: 382, and a tracr including, e.g., consisting of, SEQ ID NO: 346 (referred to in this summary of invention as gRNA molecule embodiment 60).

[0131] In other preferred embodiments, the invention provides a gRNA molecule (e.g., that is a sgRNA molecule) including, e.g., consisting of, the sequence: (a) SEQ ID NO: 383; (b) SEQ ID NO: 384; or (c) SEQ ID NO: 1772 (referred to in this summary of invention as gRNA molecule embodiment 61).

[0132] In other preferred embodiments, the invention provides gRNA molecule (e.g., that is a dual gRNA molecule) including, e.g., consisting of: (a) a crRNA including, e.g., consisting of, SEQ ID NO: 385, and a tracr including, e.g., consisting of, SEQ ID NO: 6660; (b) a crRNA including, e.g., consisting of, SEQ ID NO: 385, and a tracr including, e.g., consisting of, SEQ ID NO: 346; (c) a crRNA including, e.g., consisting of, SEQ ID NO: 386, and a tracr including, e.g., consisting of, SEQ ID NO: 6660; or (d) a crRNA including, e.g., consisting of, SEQ ID NO: 386, and a tracr including, e.g., consisting of, SEQ ID NO: 346 (referred to in this summary of invention as gRNA molecule embodiment 62).

[0133] In other preferred embodiments, the invention provides a gRNA molecule (e.g., that is a sgRNA molecule) including, e.g., consisting of, the sequence: (a) SEQ ID NO: 387; (b) SEQ ID NO: 388; or (c) SEQ ID NO: 1773 (referred to in this summary of invention as gRNA molecule embodiment 63).

[0134] In other preferred embodiments, the invention provides gRNA molecule (e.g., that is a dual gRNA molecule) including, e.g., consisting of: (a) a crRNA including, e.g., consisting of, SEQ ID NO: 389, and a tracr including, e.g., consisting of, SEQ ID NO: 6660; (b) a crRNA including, e.g., consisting of, SEQ ID NO: 389, and a tracr including, e.g., consisting of, SEQ ID NO: 346; (c) a crRNA including, e.g., consisting of, SEQ ID NO: 390, and a tracr including, e.g., consisting of, SEQ ID NO: 6660; or (d) a crRNA including, e.g., consisting of, SEQ ID NO: 390, and a tracr including, e.g., consisting of, SEQ ID NO: 346 (referred to in this summary of invention as gRNA molecule embodiment 64).

[0135] In other preferred embodiments, the invention provides a gRNA molecule (e.g., that is a sgRNA molecule) including, e.g., consisting of, the sequence: (a) SEQ ID NO: 391; (b) SEQ ID NO: 392; or (c) SEQ ID NO: 1774 (referred to in this summary of invention as gRNA molecule embodiment 65).

[0136] In other preferred embodiments, the invention provides gRNA molecule (e.g., that is a dual gRNA molecule) including, e.g., consisting of: (a) a crRNA including, e.g., consisting of, SEQ ID NO: 393, and a tracr including, e.g., consisting of, SEQ ID NO: 6660; (b) a crRNA including, e.g., consisting of, SEQ ID NO: 393, and a tracr including, e.g., consisting of, SEQ ID NO: 346; (c) a crRNA including, e.g., consisting of, SEQ ID NO: 394, and a tracr including, e.g., consisting of, SEQ ID NO: 6660; or (d) a crRNA including, e.g., consisting of, SEQ ID NO: 394, and a tracr including, e.g., consisting of, SEQ ID NO: 346 (referred to in this summary of invention as gRNA molecule embodiment 66).

[0137] In other preferred embodiments, the invention provides a gRNA molecule (e.g., that is a sgRNA molecule) including, e.g., consisting of, the sequence: (a) SEQ ID NO: 395; (b) SEQ ID NO: 396; or (c) SEQ ID NO: 1775 (referred to in this summary of invention as gRNA molecule embodiment 67).

[0138] In other preferred embodiments, the invention provides gRNA molecule (e.g., that is a dual gRNA molecule) including, e.g., consisting of: (a) a crRNA including, e.g., consisting of, SEQ ID NO: 397, and a tracr including, e.g., consisting of, SEQ ID NO: 6660; (b) a crRNA including, e.g., consisting of, SEQ ID NO: 397, and a tracr including, e.g., consisting of, SEQ ID NO: 346; (c) a crRNA including, e.g., consisting of, SEQ ID NO: 398, and a tracr including, e.g., consisting of, SEQ ID NO: 6660; or (d) a crRNA including, e.g., consisting of, SEQ ID NO: 398, and a tracr including, e.g., consisting of, SEQ ID NO: 346 (referred to in this summary of invention as gRNA molecule embodiment 68).

[0139] In embodiments, including in any of the aforementioned aspects and embodiments, the invention provides a gRNA molecule, wherein when a CRISPR system (e.g., an RNP as described herein) including the gRNA molecule is introduced into a cell, an indel is formed at or near the target sequence complementary to the targeting domain of the gRNA molecule. In embodiments, including in embodiments comprising a targeting domain complementary to a target sequence of a +58 Enhancer region, the indel does not include a nucleotide of a GATA-1 and/or TAL-1 binding site. In embodiments, the indel does not interfere with the binding of GATA-1 and/or TAL-1 to their binding sites. In embodiments, including in any of the aforementioned aspects and embodiments, the invention provides a gRNA molecule, wherein when a CRISPR system (e.g., an RNP as described herein) including the gRNA molecule is introduced into a population of cells, an indel is formed at or near the target sequence complementary to the targeting domain of the gRNA molecule in at least about 40%, e.g., at least about 50%, e.g., at least about 60%, e.g., at least about 70%, e.g., at least about 80%, e.g., at least about 90%, e.g., at least about 95%, e.g., at least about 96%, e.g., at least about 97%, e.g., at least about 98%, e.g., at least about 99%, of the cells of the population. In embodiments, including in any of the aforementioned aspects and embodiments, the invention provides a gRNA molecule, wherein when a CRISPR system (e.g., an RNP as described herein) including the gRNA molecule is introduced into a population of cells, an indel that does not include a nucleotide of a GATA-1 and/or TAL-1 binding site is formed at or near the target sequence complementary to the targeting domain of the gRNA molecule in at least about 20%, e.g., at least about 30%, e.g., at least about 35%, e.g., at least about 40%, e.g., at least about 45%, e.g., at least about 50%, e.g., at least about 55%, e.g., at least about 60%, e.g., at least about 65%, e.g., at least about 70%, e.g., at least about 75%, e.g., at least about 80%, e.g., at least about 85%, e.g., at least about 90%, e.g., at least about 95%, e.g., at least about 99%, of the cells of the population. In embodiments, including in any of the aforementioned aspects and embodiments, the indel is an indel listed in any of FIG. 25, Table 15, Table 26, Table 27 or Table 37. In embodiments, in at least about 30%, e.g., least about 40%, e.g., at least about 50%, e.g., at least about 60%, e.g., at least about 70%, e.g., at least about 80%, e.g., at least about 90%, e.g., at least about 95%, e.g., at least about 96%, e.g., at least about 97%, e.g., at least about 98%, e.g., at least about 99%, of the cells of the population, the indel is an indel listed in any of FIG. 25, Table 15, Table 26, Table 27 or Table 37. In embodiments, the three most frequently detected indels in said population of cells include the indels associated with any gRNA molecule listed in any of FIG. 25, Table 15, Table 26, Table 27 or Table 37. In embodiments, the indel (or pattern of top indels) is as measured by next generation sequencing (NGS), e.g., as described in the art. In embodiments, including in any of the aforementioned aspects and embodiments, the invention provides a gRNA molecule, wherein when a CRISPR system (e.g., an RNP as described herein) including the gRNA molecule is introduced into a cell, no off-target indels are formed in said cell, e.g., as detectible by next generation sequencing and/or a nucleotide insertional assay, e.g., assayed in an HPCS cell, e.g., a CD34+ cell. In embodiments, including in any of the aforementioned aspects and embodiments, the invention provides a gRNA molecule, wherein when a CRISPR system (e.g., an RNP as described herein) including the gRNA molecule is introduced into a population of cells, no off-target indel is detected in more than about 5%, e.g., more than about 1%, e.g., more than about 0.1%, e.g., more than about 0.01%, of the cells of the population of cells, e.g., as detectible by next generation sequencing and/or a nucleotide insertional assay, e.g., assayed in a population of HPSC cells, e.g., a population of CD34+ cells.

[0140] In embodiments, including in any of the aforementioned aspects and embodiments, the invention provides a gRNA molecule, wherein when a CRISPR system (e.g., an RNP as described herein) including the gRNA molecule is introduced into a cell, expression of fetal hemoglobin is increased in said cell or its progeny, e.g., its erythroid progeny, e.g., its red blood cell progeny. In embodiments, expression of fetal hemoglobin is increased in said cell or its progeny, e.g., its erythroid progeny, e.g., its red blood cell progeny, by at least about 20%, e.g., at least about 30%, e.g., at least about 40%, e.g., at least about 50%, e.g., at least about 60%, e.g., at least about 70%, e.g., at least about 80%, e.g., at least about 90%, e.g., at least about 95%, e.g., at least about 96%, e.g., at least about 97%, e.g., at least about 98%, e.g., at least about 99%. In embodiments, said cell or its progeny, e.g., its erythroid progeny, e.g., its red blood cell progeny, produces at least about 6 picograms (e.g., at least about 7 picograms, at least about 8 picograms, at least about 9 picograms, at least about 10 picograms, or from about 8 to about 9 picograms, or from about 9 to about 10 picograms) fetal hemoglobin per cell. In embodiments, including in any of the aforementioned aspects and embodiments, the invention provides a gRNA molecule, wherein when a CRISPR system (e.g., an RNP as described herein) including the gRNA molecule is introduced into a cell, levels of fetal hemoglobin (e.g., gamma globin) mRNA are increased in said cell or its progeny, e.g., its erythroid progeny, e.g., its red blood cell progeny. In embodiments, including in any of the aforementioned aspects and embodiments, the invention provides a gRNA molecule, wherein when a CRISPR system (e.g., an RNP as described herein) including the gRNA molecule is introduced into a cell, expression of BCL11a mRNA is decreased in said cell or its progeny, e.g., its erythroid progeny, e.g., its red blood cell progeny. In embodiments, including in any of the aforementioned aspects and embodiments, the invention provides a gRNA molecule, wherein when a CRISPR system (e.g., an RNP as described herein) including the gRNA molecule is introduced into a cell, levels of BCL11a mRNA are decreased in said cell or its progeny, e.g., its erythroid progeny, e.g., its red blood cell progeny.

[0141] In any of the aforementioned aspects and embodiments that mention a cell, the cell is (or population of cells includes) a mammalian, primate, or human cell, e.g., is a human cell or population of human cells. In embodiments, the cell is (or population of cells includes) an HSPC, for example, is CD34+, for example, is CD34+CD90+. In embodiments, the cell (or population of cells) is autologous with respect to a patient to be administered said cell. In other embodiments, the cell (or population of cells) is allogeneic with respect to a patient to be administered said cell.

[0142] In another aspect, the invention provides a composition including: 1) one or more gRNA molecules (including a first gRNA molecule) described herein, for example, one or more gRNA molecules of any of the previous aspects and embodiments, and a Cas9 molecule, for example, as described herein; 2) one or more gRNA molecules (including a first gRNA molecule) described herein, for example, one or more gRNA molecules of any of the previous aspects and embodiments, and nucleic acid encoding a Cas9 molecule (described herein); 3) nucleic acid encoding one or more gRNA molecules (including a first gRNA molecule) described herein, for example, one or more gRNA molecules of any of the previous aspects and embodiments, and a Cas9 molecule (described herein); 4) nucleic acid encoding one or more gRNA molecules (including a first gRNA molecule) described herein, for example, one or more gRNA molecules of any of the previous aspects and embodiments, and nucleic acid encoding a Cas9 molecule (described herein); or 5) any of 1) to 4), above, and a template nucleic acid; or 6) any of 1) to 4) above, and nucleic acid including sequence encoding a template nucleic acid.

[0143] In preferred embodiments, the invention provides a composition including a first gRNA molecule (e.g., described herein, e.g., a first gRNA molecule of any of the previous gRNA molecule aspects and embodiments), further including a Cas9 molecule (described herein).

[0144] In embodiments, the Cas9 molecule is an active or inactive S. pyogenes Cas9. In embodiments, the Cas9 molecule includes SEQ ID NO: 6611. In embodiments, the Cas9 molecule includes, e.g., consists of: (a) SEQ ID NO: 7821; (b) SEQ ID NO: 7822; (c) SEQ ID NO: 7823; (d) SEQ ID NO: 7824; (e) SEQ ID NO: 7825; (f) SEQ ID NO: 7826; (g) SEQ ID NO: 7827; (h) SEQ ID NO: 7828; (i) SEQ ID NO: 7829; (j) SEQ ID NO: 7830; or (k) SEQ ID NO: 7831.

[0145] In preferred embodiments, the first gRNA molecule and Cas9 molecule are present in a ribonuclear protein complex (RNP).

[0146] In embodiments, the invention provides a composition, e.g., a composition of any of the previous aspects and embodiments, further including a second gRNA molecule; a second gRNA molecule and a third gRNA molecule; or a second gRNA molecule, optionally, a third gRNA molecule, and, optionally, a fourth gRNA molecule, wherein the second gRNA molecule, the optional third gRNA molecule, and the optional fourth gRNA molecule are a gRNA molecule of a gRNA molecule described herein, e.g., a gRNA molecule of any of the previous gRNA molecule aspects and embodiments, and wherein each gRNA molecule of the composition is complementary to a different target sequence.

[0147] In embodiments, two or more of the first gRNA molecule, the second gRNA molecule, the optional third gRNA molecule, and the optional fourth gRNA molecule are complementary to target sequences within the same gene or region. In embodiments, the first gRNA molecule, the second gRNA molecule, the optional third gRNA molecule, and the optional fourth gRNA molecule are complementary to target sequences not more than 20000 nucleotides, not more than 10000 nucleotides, not more than 6000, not more than 5000 nucleotides, not more than 4000, not more than 1000 nucleotides, not more than 500 nucleotides, not more than 400 nucleotides, not more than 300 nucleotides, not more than 200 nucleotides, not more than 100 nucleotides, not more than 90 nucleotides, not more than 80 nucleotides, not more than 70 nucleotides, not more than 60 nucleotides, not more than 50 nucleotides, not more than 40 nucleotides, not more than 30 nucleotides, not more than 20 nucleotides or not more than 10 nucleotides apart.

[0148] In other embodiments, two or more of the first gRNA molecule, the second gRNA molecule, the optional third gRNA molecule, and the optional fourth gRNA molecule are complementary to target sequence within different genes or regions.

[0149] In embodiments, including in any of the aforementioned composition aspects and embodiments, the invention provides a composition including a first gRNA molecule and a second gRNA molecule, wherein the first gRNA molecule and second gRNA molecule are:
[0150] (a) independently selected from the gRNA molecules of gRNA molecule embodiment 4, and are complementary to different target sequences;
[0151] (b) independently selected from the gRNA molecules of gRNA molecule embodiment 5, and are complementary to different target sequences;
[0152] c) independently selected from the gRNA molecules of gRNA molecule embodiment 6, and are complementary to different target sequences; or
[0153] (d) independently selected from the gRNA molecules of gRNA molecule embodiment 7, and are complementary to different target sequences; or
[0154] (e) independently selected from the gRNA molecules of any of gRNA molecule embodiments 41-56, and are complementary to different target sequences.

[0155] In embodiments, including in any of the aforementioned composition aspects and embodiments, the invention provides a composition including a first gRNA molecule and a second gRNA molecule, wherein the first gRNA molecule and second gRNA molecule are:
[0156] (a) independently selected from the gRNA molecules of gRNA molecule embodiment 10, and are complementary to different target sequences; or
[0157] (b) independently selected from the gRNA molecules of gRNA molecule embodiment 11, and are complementary to different target sequences.

[0158] In embodiments, including in any of the aforementioned composition aspects and embodiments, the invention provides a composition, including a first gRNA molecule and a second gRNA molecule, wherein the first gRNA molecule and second gRNA molecule are:
[0159] (a) independently selected from the gRNA molecules of gRNA molecule embodiment 13, and are complementary to different target sequences; or
[0160] (b) independently selected from the gRNA molecules of gRNA molecule embodiment 14, and are complementary to different target sequences.

[0161] In embodiments, including in any of the aforementioned composition aspects and embodiments, the invention provides a composition, including a first gRNA molecule and a second gRNA molecule, wherein the first gRNA molecule and second gRNA molecule are:
[0162] (a) independently selected from the gRNA molecules of gRNA molecule embodiment 16, and are complementary to different target sequences;
[0163] (b) independently selected from the gRNA molecules of gRNA molecule embodiment 17, and are complementary to different target sequences;
[0164] (c) independently selected from the gRNA molecules of gRNA molecule embodiment 18, and are complementary to different target sequences; or
[0165] (d) independently selected from the gRNA molecules of any of gRNA molecule embodiments 57-68, and are complementary to different target sequences.

[0166] In embodiments, including in any of the aforementioned composition aspects and embodiments, the invention provides a composition, including a first gRNA molecule and a second gRNA molecule, wherein:
[0167] (1) the first gRNA molecule is: (a) selected from the gRNA molecules of gRNA molecule embodiment 4, (b) selected from the gRNA molecules of gRNA molecule embodiment 5, (c) selected from the gRNA molecules of gRNA molecule embodiment 6, (d) selected from the gRNA molecules of gRNA molecule embodiment 7, or (e) selected from the gRNA molecules of any of gRNA molecule embodiments 41-56; and
[0168] (2) the second gRNA molecule is: (a) selected from the gRNA molecules of gRNA molecule embodiment 10, or (b) selected from the gRNA molecules of gRNA molecule embodiment 11.

[0169] In embodiments, including in any of the aforementioned composition aspects and embodiments, the invention provides a composition, including a first gRNA molecule and a second gRNA molecule, wherein:
[0170] (1) the first gRNA molecule is: (a) selected from the gRNA molecules of gRNA molecule embodiment 4, (b) selected from the gRNA molecules of gRNA molecule embodiment 5, (c) selected from the gRNA molecules of gRNA molecule embodiment 6, (d) selected from the gRNA molecules of gRNA molecule embodiment 7, or (e) selected from the gRNA molecules of any of gRNA molecule embodiments 41-56; and
[0171] (2) the second gRNA molecule is: (a) selected from the gRNA molecules of gRNA molecule embodiment 13, (b) selected from the gRNA molecules of gRNA molecule embodiment 14.

[0172] In embodiments, including in any of the aforementioned composition aspects and embodiments, the invention provides a composition, including a first gRNA molecule and a second gRNA molecule, wherein:
[0173] (1) the first gRNA molecule is: (a) selected from the gRNA molecules of gRNA molecule embodiment 4, (b) selected from the gRNA molecules of gRNA molecule embodiment 5, (c) selected from the gRNA molecules of gRNA molecule embodiment 6, (d) selected from the gRNA molecules of gRNA molecule embodiment 7, or (e) selected from the gRNA molecules of any of gRNA molecule embodiments 41-56; and
[0174] (2) the second gRNA molecule is: (a) selected from the gRNA molecules of gRNA molecule embodiment 16, (b) selected from the gRNA molecules of gRNA molecule embodiment 17, (c) selected from the gRNA molecules of gRNA molecule embodiment 18, or (d) selected from the gRNA molecules of any of gRNA molecule embodiments 57-68.

[0175] In embodiments, including in any of the aforementioned composition aspects and embodiments, the invention provides a composition, including a first gRNA molecule and a second gRNA molecule, wherein:
[0176] (1) the first gRNA molecule is: (a) selected from the gRNA molecules of gRNA molecule embodiment 10, or (b) selected from the gRNA molecules of gRNA molecule embodiment 11; and
[0177] (2) the second gRNA molecule is: (a) selected from the gRNA molecules of gRNA molecule embodiment 13, (b) selected from the gRNA molecules of gRNA molecule embodiment 14.

[0178] In embodiments, including in any of the aforementioned composition aspects and embodiments, the invention provides a composition, including a first gRNA molecule and a second gRNA molecule, wherein:
[0179] (1) the first gRNA molecule is: (a) selected from the gRNA molecules of gRNA molecule embodiment 10, or (b) selected from the gRNA molecules of gRNA molecule embodiment 11; and
[0180] (2) the second gRNA molecule is: (a) selected from the gRNA molecules of gRNA molecule embodiment 16, (b) selected from the gRNA molecules of gRNA molecule embodiment 17, (c) selected from the gRNA molecules of gRNA molecule embodiment 18, or (d) selected from the gRNA molecules of any of gRNA molecule embodiments 57-68.

[0181] In embodiments, including in any of the aforementioned composition aspects and embodiments, the invention provides a composition, including a first gRNA molecule and a second gRNA molecule, wherein:
[0182] (1) the first gRNA molecule is: (a) selected from the gRNA molecules of gRNA molecule embodiment 13, (b) selected from the gRNA molecules of gRNA molecule embodiment 14; and
[0183] (2) the second gRNA molecule is: (a) selected from the gRNA molecules of gRNA molecule embodiment 16, (b) selected from the gRNA molecules of gRNA molecule embodiment 17, (c) selected from the gRNA molecules of gRNA molecule embodiment 18, or (d) selected from the gRNA molecules of any of gRNA molecule embodiments 57-68.

[0184] In embodiments, including in any of the aforementioned composition aspects and embodiments, the invention provides a composition, including a first gRNA molecule and a second gRNA molecule, wherein:
[0185] (1) the first gRNA molecule is: (a) selected from the gRNA molecules of gRNA molecule embodiment 16, (b) selected from the gRNA molecules of gRNA molecule embodiment 17, (c) selected from the gRNA molecules of gRNA molecule embodiment 18, or (d) selected from the gRNA molecules of any of gRNA molecule embodiments 57-68; and (2) the second gRNA molecule includes a targeting domain that is complementary to a target sequence of the beta globin gene; or
[0186] (1) the first gRNA molecule is: (a) selected from the gRNA molecules of gRNA molecule embodiment 4, (b) selected from the gRNA molecules of gRNA molecule embodiment 5, (c) selected from the gRNA molecules of gRNA molecule embodiment 6, (d) selected from the gRNA molecules of gRNA molecule embodiment 7, (e) selected from the gRNA molecules of any of gRNA molecule embodiments 41-56, (f) selected from the gRNA molecules of gRNA molecule embodiment 10, (g) selected from the gRNA molecules of gRNA molecule embodiment 11, (h) selected from the gRNA molecules of gRNA molecule embodiment 13, or (i) selected from the gRNA molecules of gRNA molecule embodiment 14; and (2) the second gRNA molecule includes a targeting domain that is complementary to a target sequence of the beta globin gene.

[0187] In embodiments, including in any of the aforementioned composition aspects and embodiments, the invention provides a composition, wherein the first gRNA molecule and the second gRNA molecule are independently selected from the gRNA molecules of any of gRNA molecule embodiments 41-68.

[0188] In embodiments of the composition, with respect to the gRNA molecule components of the composition, the composition consists of a first gRNA molecule and a second gRNA molecule.

[0189] In embodiments of the composition, each of said gRNA molecules is in a ribonuclear protein complex (RNP) with a Cas9 molecule described herein.

[0190] In embodiments, including in any of the aforementioned composition aspects and embodiments, the invention provides a composition, further including a template nucleic acid, wherein the template nucleic acid includes a nucleotide that corresponds to a nucleotide at or near the target sequence of the first gRNA molecule. In embodiments, the template nucleic acid includes nucleic acid encoding: (a) human beta globin, e.g., human beta globin including one or more of the mutations G16D, E22A and T87Q, or fragment thereof; or (b) human gamma globin, or fragment thereof.

[0191] In embodiments, including in any of the aforementioned composition aspects and embodiments, the composition is formulated in a medium suitable for electroporation, for example, suitable for electroporation into HSPC cells. In embodiments of the composition which include one or more gRNA molecules, each of said gRNA molecules is in a RNP with a Cas9 molecule described herein, and wherein each of said RNP is at a concentration of less than about 10 uM, e.g., less than about 3 uM, e.g., less than about 1 uM, e.g., less than about 0.5 uM, e.g., less than about 0.3 uM, e.g., less than about 0.1 uM.

[0192] In another aspect, the invention provides a nucleic acid sequence that encodes one or more gRNA molecules described herein, for example, a gRNA molecule of any of the previous aspects and embodiments. In embodiments, the nucleic acid includes a promoter operably linked to the sequence that encodes the one or more gRNA molecules, for example, a promoter recognized by an RNA polymerase II or RNA polymerase III, for example, a U6 promoter or an HI promoter. In embodiments, the nucleic acid further encodes a Cas9 molecule, for example, described herein, for example, a Cas9 molecule that includes (e.g., consists of) any of SEQ ID NO: 6611, SEQ ID NO: 7821, SEQ ID NO: 7822, SEQ ID NO: 7823, SEQ ID NO: 7824, SEQ ID NO: 7825, SEQ ID NO: 7826, SEQ ID NO: 7827, SEQ ID NO: 7828, SEQ ID NO: 7829, SEQ ID NO: 7830, or SEQ ID NO: 7831. In embodiments, the nucleic acid includes a promoter operably linked to the sequence that encodes a Cas9 molecule, for example, an EF-1 promoter, a CMV IE gene promoter, an EF-1α promoter, an ubiquitin C promoter, or a phosphoglycerate kinase (PGK) promoter.

[0193] In another aspect, the invention provides a vector including the nucleic acid of any of the previous nucleic acid aspects and embodiments. In embodiments, the vector is selected from the group consisting of a lentiviral vector, an adenoviral vector, an adeno-associated viral (AAV) vector, a herpes simplex virus (HSV) vector, a plasmid, a minicircle, a nanoplasmid, and an RNA vector.

[0194] In another aspect, the invention provides a method of altering a cell (e.g., a population of cells), (e.g., altering the structure (e.g., sequence) of nucleic acid) at or near a target sequence within said cell, including contacting (e.g., introducing into) said cell (e.g., population of cells) with: 1) one or more gRNA molecules of any of the previous gRNA molecule aspects and embodiments and a Cas9 molecule (e.g., described herein); 2) one or more gRNA molecules of any of the previous gRNA molecule aspects and embodiments and nucleic acid encoding a Cas9 molecule (e.g., described herein); 3) nucleic acid encoding one or more gRNA molecules of any of the previous gRNA molecule aspects and embodiments and a Cas9 molecule (e.g., described herein); 4) nucleic acid encoding one or more gRNA molecules of any of the previous gRNA molecule aspects and embodiments and nucleic acid encoding a Cas9 molecule (e.g., described herein); 5) any of 1) to 4), above, and a template nucleic acid; 6) any of 1) to 4) above, and nucleic acid including sequence encoding a template nucleic acid; 7) the composition of any of the previous composition aspects and embodiments; or 8) the vector of any of the previous vector aspects and embodiments. In embodiments, the gRNA molecule or nucleic acid encoding the gRNA molecule, and the Cas9 molecule or nucleic acid encoding the Cas9 molecule, are formulated in a single composition.

[0195] In other embodiments, the gRNA molecule or nucleic acid encoding the gRNA molecule, and the Cas9 molecule or nucleic acid encoding the Cas9 molecule, are formulated in more than one composition. In embodiments that include more than one composition, the more than one composition are delivered simultaneously or sequentially. In embodiments, the cell is an animal cell, for example, a mammalian, primate, or human cell. In embodiments, the cell, is a hematopoietic stem or progenitor cell (HSPC) (e.g., a population of HSPCs), for example, the cell is a CD34+ cell, for example, the cell is a CD34+CD90+ cell. In embodiments, the cell is disposed in a composition including a population of cells that has been enriched for CD34+ cells. In embodiments, the cell (e.g. population of cells) has been isolated from bone marrow, mobilized peripheral blood, or umbilical cord blood. In embodiments, the cell is autologous with respect to a patient to be administered said cell. In other embodiments, the cell is allogeneic with respect to a patient to be administered said cell. In embodiments, the method results in an indel at or near a genomic DNA sequence complementary to the targeting domain of the one or more gRNA molecules, for example, an indel shown on FIG. 25, Table 15, Table 26, Table 27 or Table 37, for example an indel associated with the targeting domain of the gRNA molecule as shown in FIG. 25, Table 15, Table 26, Table 27 or Table 37. In embodiments, the indel is an insertion or deletion of less than about 40 nucleotides, e.g., less than 30 nucleotides, e.g., less than 20 nucleotides, e.g., less than 10 nucleotides, for example, is a single nucleotide deletion. In embodiments, the method results in a population of cells wherein at least about 50%, e.g., at least about 60%, e.g., at least about 70%, e.g., at least about 80%, e.g., at least about 90% (e.g., at least about 95%, at least about 96%, at least about 97%, at least about 98%, or at least about 99%) of the cells of the population have been altered, e.g., include an indel. In embodiments, the method (e.g., the method performed on a population of cells, e.g., described herein) results in a cell (e.g., population of cells) that is capable of differentiating into a differentiated cell of an erythroid lineage (e.g., a red blood cell), and wherein said differentiated cell exhibits an increased level of fetal hemoglobin, e.g., relative to an unaltered cell (e.g., population of cells). In embodiments, the method results in a population of cells that is capable of differentiating into a population of differentiated cells, e.g., a population of cells of an erythroid lineage (e.g., a population of red blood cells), and wherein said population of differentiated cells has an increased fraction of F cells (e.g., at least about 15%, at least about 20%, at least about 25%, at least about 30%, or at least about 40% higher) e.g., relative to a population of unaltered cells. In embodiments, the method results in a cell that is capable of differentiating into a differentiated cell, e.g., a cell of an erythroid lineage (e.g., a red blood cell), and wherein said differentiated cell produces at least about 6 picograms (e.g., at least about 7 picograms, at least about 8 picograms, at least about 9 picograms, at least about 10 picograms, or from about 8 to about 9 picograms, or from about 9 to about 10 picograms) fetal hemoglobin per cell. In embodiments, the method is performed ex vivo. In other embodiments, the method is performed in vivo.

[0196] In another aspect, the invention provides a cell, altered by the method of altering a cell of any of the previous method aspects and embodiments.

[0197] In another aspect, the invention provides a cell, obtainable the method of altering a cell of any of the previous method aspects and embodiments.

[0198] In another aspect, the invention provides a cell, including a first gRNA molecule, e.g., described herein, e.g., of any of the previous gRNA molecule aspects and embodiments, or a composition, e.g., described herein, e.g., of any of the previous composition aspects and embodiments, a nucleic acid, e.g., described herein, e.g., of any of the previous nucleic acid aspects and embodiments, or a vector, e.g., described herein, e.g., of any of the previous vector aspects and embodiments. In embodiments, the cell further includes a Cas9 molecule, e.g., described herein, for example, a Cas9 molecule that includes, e.g., consists of, any of SEQ ID NO: 6611, SEQ ID NO: 7821, SEQ ID NO: 7822, SEQ ID NO: 7823, SEQ ID NO: 7824, SEQ ID NO: 7825, SEQ ID NO: 7826, SEQ ID NO: 7827, SEQ ID NO: 7828, SEQ ID NO: 7829, SEQ ID NO: 7830, or SEQ ID NO: 7831. In embodiments, the cell includes, has included, or will include a second gRNA molecule, e.g., described herein, e.g., of any of the previous gRNA molecule aspects and embodiments, or a nucleic acid encoding a second gRNA molecule, e.g., described herein, e.g., of any of the previous gRNA molecule aspects and embodiments, wherein the first gRNA molecule and second gRNA molecule include nonidentical targeting domains. In embodiments, expression of fetal hemoglobin is increased in said cell or its progeny (e.g., its erythroid progeny, e.g., its red blood cell progeny) relative to a cell or its progeny of the same cell type that has not been modified to include a gRNA molecule. In embodiments, the cell is capable of differentiating into a differentiated cell, e.g., a cell of an erythroid lineage (e.g., a red blood cell), and wherein said differentiated cell exhibits an increased level of fetal hemoglobin, e.g., relative to a cell of the same type that has not been modified to include a gRNA molecule. In embodiments, the differentiated cell (e.g., cell of an erythroid lineage, e.g., red blood cell) produces at least about 6 picograms (e.g., at least about 7 picograms, at least about 8 picograms, at least about 9 picograms, at least about 10 picograms, or from about 8 to about 9 picograms, or from about 9 to about 10 picograms) fetal hemoglobin, e.g., relative to a cell of the same type that has not been modified to include a gRNA molecule. In embodiments, the cell has been contacted, e.g., contacted ex vivo, with a stem cell expander, e.g., described herein, e.g., a stem cell expander that is compound 1, compound 2, compound 3, compound 4, or a combination thereof (e.g., compound 1 and compound 4), for example, a stem cell expander that is compound 4. In embodiments, including in any of the aforementioned aspects and embodiments, the cell includes an indel at or near a genomic DNA sequence complementary to the targeting domain of the gRNA molecule (as described herein, e.g., a gRNA molecule of any of the aforementioned aspects and embodiments) introduced therein, for example, an indel shown on FIG. 25, Table 15, Table 26, Table 27 or Table 37, for example an indel shown on FIG. 25, Table 15, Table 26, Table 27 or Table 37 that is associated with the gRNA molecule (as described herein, e.g., a gRNA molecule of any of the aforementioned aspects and embodiments) introduced therein. In embodiments, the indel is an insertion or deletion of less than about 40 nucleotides, e.g., less than 30 nucleotides, e.g., less than 20 nucleotides, e.g., less than 10 nucleotides, for example, the indel is a single nucleotide deletion. In embodiments, including in any of the aforementioned cell aspects and embodiments, the cell is an animal cell, for example, the cell is a mammalian, a primate, or a human cell. In embodiments, including in any of the aforementioned cell aspects and embodiments, the cell is a hematopoietic stem or progenitor cell (HSPC) (e.g., a population of HSPCs), for example, the cell is a CD34+ cell, for example, the cell is a CD34+CD90+ cell. In embodiments, including in any of the aforementioned cell aspects and embodiments, the cell (e.g. population of cells) has been isolated from bone marrow, mobilized peripheral blood, or umbilical cord blood. In embodiments, including in any of the aforementioned cell aspects and embodiments, the cell is autologous with respect to a patient to be administered said cell. In embodiments, the cell is allogeneic with respect to a patient to be administered said cell.

[0199] In another aspect, the invention provides a population of cells including the cell of any of the previous cell aspects and embodiments. In embodiments, at least about 50%, e.g., at least about 60%, e.g., at least about 70%, e.g., at least about 80%, e.g., at least about 90% (e.g., at least about 95%, at least about 96%, at least about 97%, at least about 98%, or at least about 99%) of the cells of the population are a cell according to any of the previous cell aspects and embodiments. In embodiments, the population of cells is capable of differentiating into a population of differentiated cells, e.g., a population of cells of an erythroid lineage (e.g., a population of red blood cells), and wherein said population of differentiated cells has an increased fraction of F cells (e.g., at least about 15%, at least about 20%, at least about 25%, at least about 30%, or at least about 40% higher) e.g., relative to a population of unmodified cells of the same type. In embodiments, the F cells of the population of differentiated cells produce an average of at least about 6 picograms (e.g., at least about 7 picograms, at least about 8 picograms, at least about 9 picograms, at least about 10 picograms, or from about 8 to about 9 picograms, or from about 9 to about 10 picograms) fetal hemoglobin per cell. In embodiments, the population includes: 1) at least 1e6 CD34+ cells/kg body weight of the patient to whom the cells are to be administered; 2) at least 2e6 CD34+ cells/kg body weight of the patient to whom the cells are to be administered; 3) at least 3e6 CD34+ cells/kg body weight of the patient to whom the cells are to be administered; 4) at least 4e6 CD34+ cells/kg body weight of the patient to whom the cells are to be administered; or 5) from 2e6 to 10e6 CD34+ cells/kg body weight of the patient to whom the cells are to be administered. In embodiments, at least about 40%, e.g., at least about 50%, (e.g., at least about 60%, at least about 70%, at least about 80%, or at least about 90%) of the cells of the population are CD34+ cells. In embodiments, at least about 10%, e.g., at least about 15%, e.g., at least about 20%, e.g., at least about 30% of the cells of the population are CD34+CD90+ cells. In embodiments, the population of cells is derived from bone marrow, peripheral blood (e.g., mobilized peripheral blood), umbilical cord blood, or induced pluripotent stem cells (iPSCs). In a preferred embodiment, the population of cells is derived from bone marrow. In embodiments, the population of cells includes, e.g., consists of, mammalian cells, e.g., human cells. In embodiments, the population of cells is autologous relative to a patient to which it is to be administered. In other embodiments, the population of cells is allogeneic relative to a patient to which it is to be administered.

[0200] In another aspect, the invention provides a composition including a cell of any of the previous cell aspects and embodiments, or the population of cells of any of previous population of cell aspects and embodiments. In embodiments, the composition includes a pharmaceutically acceptable medium, e.g., a pharmaceutically acceptable medium suitable for cryopreservation.

[0201] In another aspect, the invention provides a method of treating a hemoglobinopathy, including administering to a patient a cell of any of the previous cell aspects and embodiments, a population of cells of any of previous population of cell aspects and embodiments, or a composition of any of the previous composition aspects and embodiments. In embodiments, the hemoglobinopathy is a thalassemia, for example, beta-thalassemia, or sickle cell disease.

[0202] In another aspect, the invention provides a method of increasing fetal hemoglobin expression in a mammal, including administering to a patient a cell of any of the previous cell aspects and embodiments, a population of cells of any of previous population of cell aspects and embodiments, or a composition of any of the previous composition aspects and embodiments.

[0203] In another aspect, the invention provides a method of preparing a cell (e.g., a population of cells) including: (a) providing a cell (e.g., a population of cells) (e.g., a HSPC (e.g., a population of HSPCs)); (b) culturing said cell (e.g., said population of cells) ex vivo in a cell culture medium including a stem cell expander; and (c) introducing into said cell a first gRNA molecule (e.g., described herein, for example, a gRNA molecule of any of the previous gRNA molecule aspects and embodiments), a nucleic acid molecule encoding a first gRNA molecule (e.g., described herein, for example, a gRNA molecule of any of the previous gRNA molecule aspects and embodiments), a composition (e.g., described herein, for example, a composition of any of the previous composition aspects and embodiments), a nucleic acid (e.g., described herein, for example, a nucleic acid of any of the previous nucleic acid aspects and embodiments), or a vector (e.g., described herein, for example, a vector of any of the previous vector aspects and embodiments). In embodiments of said method, after said introducing of step (c), said cell (e.g., population of cells) is capable of differentiating into a differentiated cell (e.g., population of differentiated cells), e.g., a cell of an erythroid lineage (e.g., population of cells of an erythroid lineage), e.g., a red blood cell (e.g., a population of red blood cells), and wherein said differentiated cell (e.g., population of differentiated cells) produces increased fetal hemoglobin, e.g., relative to the same cells which have not been subjected to step (c). In embodiments, including in any of the aforementioned method aspects and embodiments, the stem cell expander is compound 1, compound 2, compound 3, compound 4 or a combination thereof (e.g., compound 1 and compound 4), for example, is compound 4. In embodiments, including in any of the aforementioned method aspects and embodiments, the cell culture medium includes thrombopoietin (Tpo), Flt3 ligand (Flt-3L), and human stem cell factor (SCF). In embodiments, including in any of the aforementioned method aspects and embodiments, the cell culture medium further includes human interleukin-6 (IL-6). In embodiments, including in any of the aforementioned method aspects and embodiments, the cell culture medium includes thrombopoietin (Tpo), Flt3 ligand (Flt-3L), and human stem cell factor (SCF) each at a concentration ranging from about 10 ng/mL to about 1000 ng/mL, for example, each at a concentration of about 50 ng/mL, e.g., at a concentration of 50 ng/mL. In embodiments, including in any of the aforementioned method aspects and embodiments, the cell culture medium includes human interleukin-6 (IL-6) at a concentration ranging from about 10 ng/mL to about 1000 ng/mL, for example, at a concentration of about 50 ng/mL, e.g., at a concentration of 50 ng/mL. In embodiments, including in any of the aforementioned method aspects and embodiments, the cell culture medium includes a stem cell expander at a concentration ranging from about 1 nM to about 1 mM, for example, at a concentration ranging from about 1 uM to about 100 uM, for example, at a concentration ranging from about 50 uM to about 75 uM, for example, at a concentration of about 50 uM, e.g., at a concentration of 50 uM, or at a concentration of about 75 uM, e.g., at a concentration of 75 uM. In embodiments, including in any of the aforementioned method aspects and embodiments, the culturing of step (b) includes a period of culturing before the introducing of step (c), for example, the period of culturing before the introducing of step (c) is at least 12 hours, e.g., is for a period of about 1 day to about 3 days, e.g., is for a period of about 1 day to about 2 days, e.g., is for a period of about 2 days. In embodiments, including in any of the aforementioned method aspects and embodiments, the culturing of step (b) includes a period of culturing after the introducing of step (c), for example, the period of culturing after the introducing of step (c) is at least 12 hours, e.g., is for a period of about 1 day to about 10 days, e.g., is for a period of about 1 day to about 5 days, e.g., is for a period of about 2 days to about 4 days, e.g., is for a period of about 2 days or is for a period of about 3 days or is for a period of about 4 days. In embodiments, including in any of the aforementioned method aspects and embodiments, the population of cells is expanded at least 4-fold, e.g., at least 5-fold, e.g., at least 10-fold, e.g., relative to cells which are not cultured according to step (b). In embodiments, including in any of the aforementioned method aspects and embodiments, the introducing of step (c) includes an electroporation, for example, an electroporation that includes 1 to 5 pulses, e.g., 1 pulse, and wherein each pulse is at a pulse voltage ranging from 700 volts to 2000 volts and has a pulse duration ranging from 10 ms to 100 ms. In embodiments, including in any of the aforementioned method aspects and embodiments, the electroporation includes, for example, consists of, 1 pulse. In embodiments, including in any of the aforementioned method aspects and embodiments, the pulse voltage ranges from 1500 to 1900 volts, e.g., is 1700 volts. In embodiments, including in any of the aforementioned method aspects and embodiments, the pulse duration ranges from 10 ms to 40 ms, e.g., is 20 ms. In embodiments, including in any of the aforementioned method aspects and embodiments, the cell (e.g., population of cells) provided in step (a) is a human cell (e.g., a population of human cells). In embodiments, including in any of the aforementioned method aspects and embodiments, the cell (e.g., population of cells) provided in step (a) is isolated from bone marrow, peripheral blood (e.g., mobilized peripheral blood), umbilical cord blood, or induced pluripotent stem cells (iPSCs), preferably bone marrow. In embodiments, including in any of the aforementioned method aspects and embodiments, the cell (e.g., population of cells) provided in step (a) is isolated from bone marrow, e.g., is isolated from bone marrow of a patient suffering from a hemoglobinopathy. In embodiments, including in any of the aforementioned method aspects and embodiments, the population of cells provided in step (a) is enriched for HSPCs, e.g., CD34+ cells. In embodiments, including in any of the aforementioned method aspects and embodiments, subsequent to the introducing of step (c), the cell (e.g., population of cells) is cryopreserved. In embodiments, including in any of the aforementioned method aspects and embodiments, subsequent to the introducing of step (c), the cell (e.g., population of cells) includes an indel at or near a genomic DNA sequence complementary to the targeting domain of the first gRNA molecule, for example, an indel shown on FIG. 25, Table 15, Table 26, Table 27 or Table 37, for example an indel shown in FIG. 25, Table 15, Table 26, Table 27 or Table 37 as associated with the first gRNA molecule. In embodiments, including in any of the aforementioned method aspects and embodiments, after the introducing of step (c), at least about 50%, at least about 60%, at least about 70%, at least about 80%, at least about 90%, at least about 95%, at least about 96%, at least about 97%, at least about 98% or at least about 99% of the cells of the population of cells include an indel at or near a genomic DNA sequence complementary to the targeting domain of the first gRNA molecule, for example, an indel shown on FIG. 25, Table 15, Table 26, Table 27 or Table 37, for example an indel shown in FIG. 25, Table 15, Table 26, Table 27 or Table 37 as associated with the first gRNA molecule.

[0204] In another aspect, the invention provides a cell (e.g., population of cells), obtainable by the method of preparing a cell of any of the previous aspects and embodiments. In another aspect, the invention provides a method of treating a hemoglobinopathy (for example a thalassemia (e.g., beta-thalassemia) or sickle cell disease), including administering to a human patient a composition including said cell (e.g., population of cells). In another aspect, the invention provides a method of increasing fetal hemoglobin expression in a human patient, including administering to said human patient a composition including said cell (e.g., population of cells). In embodiments, the human patient is administered a composition including at least about 1e6 cells (e.g., CD34+ cells, e.g., cells obtainable by a method of preparing a cell of any of the previous aspects and embodiments) per kg body weight of the human patient, e.g., at least about 1e6 CD34+ cells obtainable by a method of preparing a cell of any of the previous aspects and embodiments per kg body weight of the human patient. In embodiments, the human patient is administered a composition including at least about 2e6 cells (e.g., CD34+ cells, e.g., cells obtainable by a method of preparing a cell of any of the previous aspects and embodiments) per kg body weight of the human patient, e.g., at least about 2e6 CD34+ cells obtainable by a method of preparing a cell of any of the previous aspects and embodiments per kg body weight of the human patient. In embodiments, the human patient is administered a composition including from about 2e6 to about 10e6 cells (e.g., CD34+ cells, e.g., cells obtainable by a method of preparing a cell of any of the previous aspects and embodiments) per kg body weight of the human patient, e.g., at least about 2e6 to about 10e6 CD34+ cells obtainable by a method of preparing a cell of any of the previous aspects and embodiments per kg body weight of the human patient.

[0205] In another aspect, the invention provides a gRNA molecule described herein, for example, a gRNA molecule of any of the previous gRNA molecule aspects and embodiments, a composition described herein, for example, a composition of any of the previous composition aspects and embodiments, a nucleic acid described herein, for example, a nucleic acid of any of the previous nucleic acid aspects and embodiments, a vector described herein, for example, a vector of any of the previous vector aspects and embodiments, a cell described herein, for example, a cell of any of the previous cell aspects and embodiments, or a population of cells described herein, for example, a population of cells of any of the previous population of cell aspects and embodiments, for use as a medicament.

[0206] In another aspect, the invention provides a gRNA molecule described herein, for example, a gRNA molecule of any of the previous gRNA molecule aspects and embodiments, a composition described herein, for example, a composition of any of the previous composition aspects and embodiments, a nucleic acid described herein, for example, a nucleic acid of any of the previous nucleic acid aspects and embodiments, a vector described herein, for example, a vector of any of the previous vector aspects and embodiments, a cell described herein, for example, a cell of any of the previous cell aspects and embodiments, or a population of cells described herein, for example, a population of cells of any of the previous population of cell aspects and embodiments, for use in the manufacture of a medicament.

[0207] In another aspect, the invention provides a gRNA molecule described herein, for example, a gRNA molecule of any of the previous gRNA molecule aspects and embodiments, a composition described herein, for example, a composition of any of the previous composition aspects and embodiments, a nucleic acid described herein, for example, a nucleic acid of any of the previous nucleic acid aspects and embodiments, a vector described herein, for example, a vector of any of the previous vector aspects and embodiments, a cell described herein, for example, a cell of any of the previous cell aspects and embodiments, or a population of cells described herein, for example, a population of cells of any of the previous population of cell aspects and embodiments, for use in the treatment of a disease.

[0208] In another aspect, the invention provides a gRNA molecule described herein, for example, a gRNA molecule of any of the previous gRNA molecule aspects and embodiments, a composition described herein, for example, a composition of any of the previous composition aspects and embodiments, a nucleic acid described herein, for example, a nucleic acid of any of the previous nucleic acid aspects and embodiments, a vector described herein, for example, a vector of any of the previous vector aspects and embodiments, a cell described herein, for example, a cell of any of the previous cell aspects and embodiments, or a population of cells described herein, for example, a population of cells of any of the previous population of cell aspects and embodiments, for use in the treatment of a disease, wherein the disease is a hemoglobinopathy, for example a thalassemia (e.g., beta-thalassemia) or sickle cell disease.

### BRIEF DESCRIPTION OF THE DRAWINGS

[0209] FIG. 1: Cas9 editing of the Bcl11a +58 erythroid enhancer region. Fraction of editing detected by NGS in HEK-293 Cas9GFP 24 h post-delivery of crRNA targeting the +58 enhancer region and trRNA by lipofection. Each dot indicates a different crRNA, the trRNA was held constant. Genomic coordinates indicate location on Chromosome 2, e.g., in reference to hg38. (n=1)

[0210] FIG. 2: Cas9 editing of the Bcl11a +62 erythroid enhancer region. Fraction of editing detected by NGS in HEK-293 Cas9GFP 24 h post-delivery of crRNA targeting the +62 enhancer region and trRNA by lipofection. Each dot indicates a different crRNA, the trRNA was held constant. Genomic coordinates indicate location on Chromosome 2, e.g., in reference to hg38. (n=1)

[0211] FIG. 3. Gating strategy for selection of cells after introduction of the Cas9 editing system.

[0212] FIG. 4. Agarose gel electrophoresis of gene fragments from Cas9 editing system-treated CD34+ cells (shown are both CD34+CD90+ and CD34+CD90− cell populations, together with reference unsorted cells). The upper band represents uncleaved homoduplex DNA and the lower bands indicate cleavage products resulting from heteroduplex DNA. The far left lane is a DNA ladder. Band intensity was calculated by peak integration of unprocessed images by ImageJ software. % gene modification (indel) was calculated as follows: % gene modification=100×(1−(1−fraction cleaved)^{1/2}), and is indicated below each corresponding lane of the gel.

[0213] FIG. 5. Erythroid enhancer region showing the sites of genomic DNA targeted by sgRNA molecules comprising targeting domains complimentary to the underlined nucleotides. Figure discloses SEQ ID NO: 2841.

[0214] FIG. 6A/6B. NGS results for indel formation by sgEH1 (CR00276) (A) or sgEH2 (CR00275) (B) in CD34+ HSC cells. Insertions are in uppercase. Deletions are indicated by a dashed line. Regions of microhomology near the cutting site are highlighted in bold underline. FIG. 6A discloses SEQ ID NOS 2842-2854 and FIG. 6B discloses SEQ ID NOS 2855-2867, all respectively, in order of appearance.

[0215] FIG. 6C/6D. NGS results for indel formation by sgEH8 (CR00273) (C) or sgEH9 (CR00277) (D) in CD34+ HSC cells. Insertions are in uppercase. Deletions are indicated by a dashed line. Regions of microhomology near the cutting site are highlighted in bold underline. FIG. 6C discloses SEQ ID NOS 2868-2880 and FIG. 6D discloses SEQ ID NOS 2881-2893, all respectively, in order of appearance.

[0216] FIG. 7. NGS results and indel pattern formation across multiple donors for g7, g8 and g2. The sequences of the top 3 indels from two biological replicate experiments using g7 and g8 were identical, and the sequence of the top 3 indels using g2 were identical to those from a previous experiment. Figure discloses SEQ ID NOS 2894-2911, respectively, in order of appearance.

[0217] FIG. 8. NGS results and indel pattern formation using a modified gRNA scaffold (BC). The sequences of the top 3 indels from these experiments are identical to those formed when using the standard gRNA scaffold. Figure discloses SEQ ID NOS 2912-2921, respectively, in order of appearance.

[0218] FIG. 9. Comparison of indel pattern across different delivery methods. AVG % refers to the % of NGS reads exhibiting the indel indicated (Average of 2 experiments). Figure discloses SEQ ID NOS 2922-2946, respectively, in order of appearance.

[0219] FIG. 10. Indel formation by co-introduction of g7 gRNA and g8 gRNA with either a non-extended flagpole region (“reg”) or with a first flagpole extension and first tracr extension (“BC”). PAM sequences for the two gRNAs are boxed. Figure discloses SEQ ID NOS 2947-2955, respectively, in order of appearance.

[0220] FIG. 11: Top gRNA sequences directed to +58 enhancer region of BCL11a gene in CD34+ cells, as measured by NGS (n=3).

[0221] FIG. 12: Top gRNA sequences directed to +62 enhancer region of BCL11a gene in CD34+ cells, as measured by NGS (n=3).

[0222] FIG. 13: Predicted excision sizes when 2 gRNA molecules targeting the BCL11a +62 enhancer locus are introduced into HEK293_Cas9 cells, when either CR00187 (light grey bars) or CR00202 (dark grey bars) is held constant and co-inserted into the cells with a second gRNA molecule including the targeting domain of the gRNA indicated.

[0223] FIG. 14: Excision of genomic DNA within the +62 enhancer of BCL11a by addition of gRNA molecules including the targeting domain of CR00187 and the second gRNA molecule indicated in the graph. Stars (*) indicate excision observed at a frequency greater than 30%; Carats (\hat{ }) indicate excision observed at a lower frequency (<30%). Those predicted excision products resulting in a fragment less than 50 nt could not be distinguished.

[0224] FIG. 15: Excision of genomic DNA within the +62 enhancer of BCL11a by addition of gRNA molecules including the targeting domain of CR00202 and the second gRNA molecule indicated in the graph. Stars (*) indicate excision observed at a frequency greater than 30%; Carats (\hat{ }) indicate excision observed at lower frequency (<30%).

[0225] FIG. 16: % indel formation by 192 gRNA molecules targeted to the French HPFH region (Sankaran V G et al. A functional element necessary for fetal hemoglobin silencing. NEJM (2011) 365:807-814.)

[0226] FIG. 17. Experimental scheme of Cas9:gRNA ribonucleoprotein (Cas9-RNP) delivery to primary human CD34+ HSPC for genome editing, followed by genetic and phenotypic characterization.

[0227] FIG. 18. Cell viability following mock electroporation or electroporation of Cas9-RNP complexes into CD34+ HSPC. The HSPC were expanded in vitro for 48 hours after electroporation of RNP complexes and the cell viability monitored and percent viability determined. The names of gRNAs used to make RNP complexes are shown on x-axis and the corresponding cell viabilities on y-axis. The CRxxxx identifier indicates the targeting domain of the gRNA molecule.

[0228] FIG. 19. Mismatch detection using T7 endonuclease assay. Human HSC were electroporated to deliver RNP complexes to introduce indels into +58 DHS region of BCL11A erythroid enhancer by NHEJ. PCR amplicons spanning the target region was subjected to the T7E1 assay and the resulting fragments analyzed by 2% agarose gel electrophoresis. Regions of +58 erythroid enhancer BCL11A were disrupted by both guide RNA formats (dual guide RNA—black; single guide RNA—gray (bottom graph and g7BCL11a-BC(1) and g7BCL11A-BC(2) from top graph)). The intensities of DNA bands were estimated by the ImageJ software (http://rsb.info.nih.gov/ij/) to determine the percent of edited alleles. Names of gRNAs used and corresponding gene editing efficiencies determined from mismatch detection assay are also shown in the table below the gel image.

[0229] FIG. 20: Percent allele editing by next generation sequencing. Labels are as described for FIGS. 18 and 19.

[0230] FIG. 21. Colony forming cell (CFC) unit assay showing colony number and types of colonies observed for five select gRNAs. The HSPCs genome edited at the +58 erythroid enhancer were plated in methylcellulose and clonal colonies classified and counted based on the number and types of mature cells using morphological and phenotypic criteria using STEMvision. The colonies were classified into colony forming unit-erythroid (CFU-E), burst forming unit-erythroid (BFU-E), colony-forming unit-granulocyte/macrophage (CFU-GM) and colony-forming unit-granulocyte/erythrocyte/macrophage/megakaryocyte (CFU-GEMM).

[0231] FIG. 22. Kinetics of cell division during erythroid differentiation. Total number of cells determined on day 0, 7, 14 and 21 during erythroid differentiation and the fold cell expansion calculated.

[0232] FIG. 23. BCL11A, gamma and beta-globin mRNA levels in genome edited and erythroid differentiated HSC. Relative mRNA expression of BCL11A, gamma- and beta-globin chains in unilineage erythroid cultures were quantified by real time PCR. Transcript levels were normalized against human GAPDH transcript levels.

[0233] FIG. 24A. Efficient editing of HSC obtained with dual gRNA/cas9 system for disruption of BCL11a enhancer (+58) resulted in high levels of induction of HbF. The HSC 48 hours after electroporation were subjected to in vitro erythroid differentiation and HbF expression was measured. The percent of HbF positive cells (F-cells) was monitored by FACS analysis at days 7, 14 and 21. Data shown in this figure was generated with dgRNA systems where the dgRNA included the indicated targeting domain.

[0234] FIG. 24B. Efficient editing of HSC obtained with sgRNA/cas9 system for disruption of BCL11a enhancer (+58) resulted in high levels of induction of HbF. The HSC 48 hours after electroporation were subjected to in vitro erythroid differentiation and HbF expression was measured. The percent of HbF positive cells (F-cells) was monitored by FACS analysis at days 7, 14 and 21. Data shown in this figure was generated with sgRNA systems where the sgRNA included the indicated targeting domain.

[0235] FIG. 25: Indel pattern produced in HSPCs by gRNAs including the indicated targeting domain. Figure discloses SEQ ID NOS 2956-2968, respectively, in order of appearance.

[0236] FIG. 26A: Phenotyping of edited and unedited cultures in CD34+ cell expansion medium by cell surface marker staining. All gRNA molecules were tested in the dgRNA format. The Tracr used was SEQ ID NO: 7808, and the crRNA had the following format and sequence with 2′O-Methyl (m) and Phosphorothioate Bond (*) modifications indicated: mN*mN*mN*rNrNrNrNrNrNrNrNrNrNrNrNrNrNrNrNrNrGrUrUrUrUrArGrArGrCrUrArU*mG*mC*mU (SEQ ID NO: 7832), where N's are the residues of the indicated targeting domain. Shown are representative dot plots showing the fluorescence of cells stained with each antibody panel or corresponding isotype controls as described in Materials and Methods. Cells shown were pre-gated on the viable cell population by forward and side scatter properties and DAPI (4′,6-Diamidino-2-Phenylindole) discrimination. The percentage of each cell population named at the top of the plot was determined by the gate indicated by the bold lined box.

[0237] FIG. 26B: Phenotyping of edited and unedited cultures in CD34+ cell expansion medium by cell surface marker staining. All gRNA molecules were tested in the dgRNA format. The Tracr used was SEQ ID NO: 7808, and the crRNA had the following format and sequence with 2′O-Methyl (m) and Phosphorothioate Bond (*) modifications indicated: mN*mN*mN*rNrNrNrNrNrNrNrNrNrNrNrNrNrNrNrNrNrGrUrUrUrUrArGrArGrCrUrArU*mG*mC*mU (SEQ ID NO: 7832), where N's are the residues of the indicated targeting domain. Shown is the percentage of each named cell population in edited and unedited cultures. Targeting domain of the edited cultures is as indicated.

[0238] FIG. 27. % F cells in erythrocytes differentiated from populations of CD34+ cells edited with RNPs comprising dgRNAs targeting two sites within the HPFH region. “g2” is the positive control (targeting domain to a coding region of BCL11a gene); “cntrl” is negative control (introduction of Cas9 only).

[0239] FIG. 28A. % Editing as determined by NGS in CD34+ HSPCs at day 2 following electroporation of RNP comprising the indicated dgRNA (unmod or modified as indicated). Controls include dgRNA comprising the targeting domain of CR00317 unmodified (CR00317-m), or electroporation in buffer only (No Cas9 or gRNA; “Mock”).

[0240] FIG. 28B. % Editing as determined by NGS in CD34+ HSPCs at day 2 following electroporation of RNP comprising the indicated dgRNA (unmod or modified as indicated). Controls include electroporation in buffer only (No Cas9 or gRNA; “Mock”).

[0241] FIG. 29. % Editing as determined by NGS in CD34+ HSPCs at day 2 following electroporation of RNP comprising the indicated sgRNA (unmod or modified as indicated. In each case the number corresponds to the CRxxxxxx identifier of the targeting domain, for example, Unmod sg312 refers to unmodified sgRNA comprising the targeting domain of CR00312). Controls include electroporation of Cas9 protein only (“Cas9”), electroporation with buffer only (“mock”), or with no electroporation (“WT”).

[0242] FIG. 30A. Normalized % Erythrocytes (% F cells in “Mock” subtracted) that are HbF+ after electroporation of CD34+ HSPCs with RNP comprising the indicated dgRNA (unmod or modified as indicated) and then induced to differentiate by culture in erythroid differentiation medium. Controls include electroporation of buffer only (“mock”).

[0243] FIG. 30B. Normalized % Erythrocytes (% F cells in “Mock” subtracted) that are HbF+ after electroporation of CD34+ HSPCs with RNP comprising the indicated dgRNA (unmod or modified as indicated) and then in induced to differentiate by culture in erythroid differentiation medium. Controls include electroporation of buffer only (“mock”).

[0244] FIG. 31. Normalized % Erythrocytes (% F cells in “Mock” subtracted) that are HbF+ after electroporation of CD34+ HSPCs with RNP comprising the indicated sgRNA (unmod or modified as indicated. In each case the number corresponds to the CRxxxxxx identifier of the targeting domain, for example, Unmod sg312 refers to unmodified sgRNA comprising the targeting domain of CR00312) and then in induced to differentiate by culture in erythroid differentiation medium. Controls include electroporation of Cas9 protein and tracr only (“Cas9+TracRNA only”), electroporation with buffer only (“Cells only+Pulse”), or with no electroporation (“Cells only no pulse”).

[0245] FIG. 32. Fold total cell expansion in culture at day 14 after erythroid differentiation after electroporation of RNP comprising the indicated sgRNA (in each case, the number corresponds to the CRxxxxxx identifier of the targeting domain, for example, Unmod sg312 refers to unmodified sgRNA comprising the targeting domain of CR00312) into CD34+ cells. Controls include electroporation of Cas9 protein and tracr only (“Cas9+TracRNA only”), electroporation with buffer only (“Cells only+Pulse”), or with no electroporation (“Cells only no pulse”).

[0246] FIG. 33. Assessment of potential off-target sites cleaved by Cas9 directed by dgRNA molecules targeting the BCL11a enhancer region. Triangles represent the on-target site while open circles represent a potential off-target site for each guide RNA tested.

[0247] FIG. 34. Editing efficiency at targeted B2M locus in CD34+ hematopoietic stem cells by different Cas9 variants, as evaluated by NGS and Flow cytometry. NLS=SV40 NLS; His6 (SEQ ID NO: 2969) or His8 (SEQ ID NO: 2970) refers to 6 or 8 histidine residues, respectively (SEQ ID NOS 2969-2970, respectively); TEV=tobacco etch virus cleavage site; Cas9=wild type S. pyogenes Cas9—mutations or variants are as indicated).

[0248] FIG. 35. Data show fold increase in cell number after a total of 10 days of culturing in expansion medium (3 days of culturing prior to electroporation and 7 days of culturing following electroporation). With all the guide RNAs tested, including both single and dual guide RNA formats, cell expansion ranged from 2-7 fold. CR00312 and CR001128, indicated by arrows, demonstrated a 3-6 fold increase after 10 days of cell expansion. Labels “Crxxxx” refer to dgRNA having the indicated targeting domain; “sgxxxx” refer to sgRNA having the targeting domain of the CRxxxxx identifier with the same number (e.g., sg312 has the targeting domain of CR00312); “Unmod” indicates no modification to theRNA(s); “O′MePS”, when used in relation to a dgRNA refers to a crRNA which has three 3′ and three 5′ 2′-OMe modifications and phosphorothioate bonds, paired with an unmodified tracr; “O′MePS”, when used in relation to a sgRNA refers to gRNA which has three 5′-terminal 2′-OMe modifications and phosphorothioate bonds, three 3′-terminal phosphorothioate bonds, and three 2′OMe modifications of the 4^{th}-to-last, 3^{rd}-to-last and 2^{nd}-to-last 3′ nucleotides.

[0249] FIG. 36. Gating strategy to distinguish different HSPC subpopulations.

[0250] FIG. 37. Frequency of each hematopoietic subset after 48 hours ex vivo culture in the indicated medium (STF modified with IL6, Compound 4, or both IL6 and Compound 4), but before electroporation of a CRISPR system. STF=StemSpan SFEM.

[0251] FIG. 38. Frequency of each hematopoietic subset 7 days after electroporation introducing a CRISPR system targeting the +58 enhancer of BCL11a, cultured in the indicated medium (STF modified with IL6, Compound 4, or both IL6 and Compound 4). STF=StemSpan SFEM.

[0252] FIG. 39A. Cell viability upon gene editing using different RNP concentrations, with RNP containing dgRNAs targeting the +58 region.

[0253] FIG. 39B. Cell viability upon gene editing using different RNP concentrations, with RNP containing sgRNAs targeting the +58 region.

[0254] FIG. 40A. Gene editing efficiency measured by NGS upon gene editing using different RNP concentrations, with RNP containing dgRNAs targeting the +58 region.

[0255] FIG. 40B Gene editing efficiency measured by NGS upon gene editing using different RNP concentrations, with RNP containing sgRNAs targeting the +58 region.

[0256] FIG. 41A. Percentage of HbF induction measured by flow cytometry upon gene editing using different RNP concentrations, with RNP containing dgRNAs targeting the +58 region.

[0257] FIG. 41B Percentage of HbF induction measured by flow cytometry upon gene editing using different RNP concentrations, with RNP containing sgRNAs targeting the +58 region.

[0258] FIG. 42A. Gene editing efficiencies of RNPs with different Cas9 proteins. Gene editing was performed using different Cas9 variants (listed on the X-axis) coupled with either the unmodified version of sgRNA CR00312 and sgRNA CR001128, or a modified version of sgRNA CR00312 and sgRNA CR001128. Edited cells were subjected to NGS to determine % edit (Y-axis).

[0259] FIG. 42B. Induction of HbF+ cells upon gene editing using different Cas9 proteins. Gene editing was performed using different Cas9 variants (listed on the X-axis) coupled with either the unmodified version of sgRNA CR00312 and sgRNA CR001128, or a modified version of sgRNA CR00312 and sgRNA CR001128. Edited cells were differentiated into erythroid lineage and HbF production assessed by flow cytometry using an anti-HbF antibody conjugated with fluorophore.

[0260] FIG. 43. % Editing as determined by NGS in CD34+ HSPCs by electroporation of RNP comprising the indicated dgRNA or sgRNA (unmod or modified as indicated) (labels refer to the gRNA sequences as indicated in Table 36). Editing was determined at either 2 days (black bars) or 6 days (gray bars) post-electroporation. Less than 1.5% editing was detected at each site after control electroporation of Cas9 protein and Tracr only (“none”, data not shown). Mean+standard deviation of 2 electroporation replicates is shown.

[0261] FIG. 44. Percent of viable cells that are CD71+ after electroporation into CD34+ HSPCs of RNP comprising the indicated dgRNA or sgRNA (unmod or modified as indicated) (labels refer to the gRNA sequences as indicated in Table 36) and culture in erythroid differentiation conditions for 7 days. After electroporation, cells were maintained by Protocol 1 (black bars) or Protocol 2 (gray bars), as described in Example 4.7. Controls include electroporation of Cas9 protein and Tracr only (“none”). Mean+standard deviation of 2 electroporation replicates is shown.

[0262] FIG. 45. Percent of erythroid cells that are HbF+ after electroporation into CD34+ HSPCs of RNP comprising the indicated dgRNA or sgRNA (unmod or modified as indicated) (labels refer to the gRNA sequences as indicated in Table 36) and culture in erythroid differentiation conditions for 7 days. After electroporation, cells were maintained by Protocol 1 (black bars) or Protocol 2 (gray bars), as described in Example 4.7. Controls include electroporation of Cas9 protein and Tracr only (“none”). Mean+standard deviation of 2 electroporation replicates is shown.

[0263] FIG. 46. Percent of cells that are HbF+ after electroporation into CD34+ HSPCs of RNP comprising the indicated dgRNA or sgRNA (unmod or modified as indicated) (labels refer to the gRNA sequences as indicated in Table 36) and cultured in erythroid differentiation conditions for 14 days. After electroporation, cells were maintained by Protocol 1 (black bars) or Protocol 2 (gray bars), as described in Example 4.7. Controls include electroporation of Cas9 protein and Tracr only (“none”). Mean+standard deviation of 2 electroporation replicates is shown.

[0264] FIG. 47. Percent of cells that are HbF+ after electroporation into CD34+ HSPCs of RNP comprising the indicated dgRNA or sgRNA (unmod or modified as indicated) (labels refer to the gRNA sequences as indicated in Table 36) and cultured in erythroid differentiation conditions for 21 days. After electroporation, cells were maintained by Protocol 1 (black bars) or Protocol 2 (gray bars), as described in Example 4.7. Controls include electroporation of Cas9 protein and Tracr only (“none”). Mean+standard deviation of 2 electroporation replicates is shown.

[0265] FIG. 48. Fold total cell expansion in erythroid differentiation culture for 7 (black bars) or 21 days (black bars) after electroporation into CD34+ HSPCs of RNP comprising the indicated dgRNA or sgRNA (unmod or modified as indicated) (labels refer to the gRNA sequences as indicated in Table 36). After electroporation, cells were maintained by Protocol 2, as described in Example 4.7. Controls include electroporation of Cas9 protein and Tracr only (“none”). Mean+standard deviation of 2 electroporation replicates is shown.

[0266] FIG. 49. Assessment of potential off-target sites cleaved by Cas9 directed by dgRNA molecules targeting an HPFH region. Triangles represent the on-target site while open circles represent a potential off-target site for each guide RNA tested.

### DEFINITIONS

[0267] The terms “CRISPR system,” “Cas system” or “CRISPR/Cas system” refer to a set of molecules comprising an RNA-guided nuclease or other effector molecule and a gRNA molecule that together are necessary and sufficient to direct and effect modification of nucleic acid at a target sequence by the RNA-guided nuclease or other effector molecule. In one embodiment, a CRISPR system comprises a gRNA and a Cas protein, e.g., a Cas9 protein. Such systems comprising a Cas9 or modified Cas9 molecule are referred to herein as “Cas9 systems” or “CRISPR/Cas9 systems.” In one example, the gRNA molecule and Cas molecule may be complexed, to form a ribonuclear protein (RNP) complex.

[0268] The terms “guide RNA,” “guide RNA molecule,” “gRNA molecule” or “gRNA” are used interchangeably, and refer to a set of nucleic acid molecules that promote the specific directing of a RNA-guided nuclease or other effector molecule (typically in complex with the gRNA molecule) to a target sequence. In some embodiments, said directing is accomplished through hybridization of a portion of the gRNA to DNA (e.g., through the gRNA targeting domain), and by binding of a portion of the gRNA molecule to the RNA-guided nuclease or other effector molecule (e.g., through at least the gRNA tracr). In embodiments, a gRNA molecule consists of a single contiguous polynucleotide molecule, referred to herein as a “single guide RNA” or “sgRNA” and the like. In other embodiments, a gRNA molecule consists of a plurality, usually two, polynucleotide molecules, which are themselves capable of association, usually through hybridization, referred to herein as a “dual guide RNA” or “dgRNA,” and the like. gRNA molecules are described in more detail below, but generally include a targeting domain and a tracr. In embodiments the targeting domain and tracr are disposed on a single polynucleotide. In other embodiments, the targeting domain and tracr are disposed on separate polynucleotides.

[0269] The term “targeting domain” as the term is used in connection with a gRNA, is the portion of the gRNA molecule that recognizes, e.g., is complementary to, a target sequence, e.g., a target sequence within the nucleic acid of a cell, e.g., within a gene.

[0270] The term “crRNA” as the term is used in connection with a gRNA molecule, is a portion of the gRNA molecule that comprises a targeting domain and a region that interacts with a tracr to form a flagpole region.

[0271] The term “target sequence” refers to a sequence of nucleic acids complimentary, for example fully complementary, to a gRNA targeting domain. In embodiments, the target sequence is disposed on genomic DNA. In an embodiment the target sequence is adjacent to (either on the same strand or on the complementary strand of DNA) a protospacer adjacent motif (PAM) sequence recognized by a protein having nuclease or other effector activity, e.g., a PAM sequence recognized by Cas9. In embodiments, the target sequence is a target sequence within a gene or locus that affects expression of a globin gene, e.g., that affects expression of beta globin or fetal hemoglobin (HbF). In embodiments, the target sequence is a target sequence within the globin locus. In embodiments, the target sequence is a target sequence within the BCL11a gene. In embodiments, the target sequence is a target sequence within the BCL11a enhancer region. In embodiments, the target sequence is a target sequence within a HPFH region.

[0272] The term “flagpole” as used herein in connection with a gRNA molecule, refers to the portion of the gRNA where the crRNA and the tracr bind to, or hybridize to, one another.

[0273] The term “tracr” as used herein in connection with a gRNA molecule, refers to the portion of the gRNA that binds to a nuclease or other effector molecule. In embodiments, the tracr comprises nucleic acid sequence that binds specifically to Cas9. In embodiments, the tracr comprises nucleic acid sequence that forms part of the flagpole.

[0274] The terms “Cas9” or “Cas9 molecule” refer to an enzyme from bacterial Type II CRISPR/Cas system responsible for DNA cleavage. Cas9 also includes wild-type protein as well as functional and non-functional mutants thereof. In embodiments, the Cas9 is a Cas9 of S. pyogenes.

[0275] The term “complementary” as used in connection with nucleic acid, refers to the pairing of bases, A with T or U, and G with C. The term complementary refers to nucleic acid molecules that are completely complementary, that is, form A to T or U pairs and G to C pairs across the entire reference sequence, as well as molecules that are at least 80%, 85%, 90%, 95%, 99% complementary.

[0276] “Template Nucleic Acid” as used in connection with homology-directed repair or homologous recombination, refers to nucleic acid to be inserted at the site of modification by the CRISPR system donor sequence for gene repair (insertion) at site of cutting.

[0277] An “indel,” as the term is used herein, refers to a nucleic acid comprising one or more insertions of nucleotides, one or more deletions of nucleotides, or a combination of insertions and deflections of nucleotides, relative to a reference nucleic acid, that results after being exposed to a composition comprising a gRNA molecule, for example a CRISPR system. Indels can be determined by sequencing nucleic acid after being exposed to a composition comprising a gRNA molecule, for example, by NGS. With respect to the site of an indel, an indel is said to be “at or near” a reference site (e.g., a site complementary to a targeting domain of a gRNA molecule) if it comprises at least one insertion or deletion within about 10, 9, 8, 7, 6, 5, 4, 3, 2, or 1 nucleotide(s) of the reference site, or is overlapping with part or all of said reference site (e.g., comprises at least one insertion or deletion overlapping with, or within 10, 9, 8, 7, 6, 5, 4, 3, 2, or 1 nucleotides of a site complementary to the targeting domain of a gRNA molecule, e.g., a gRNA molecule described herein).

[0278] An “indel pattern,” as the term is used herein, refers to a set of indels that results after exposure to a composition comprising a gRNA molecule. In an embodiment, the indel pattern consists of the top three indels, by frequency of appearance. In an embodiment, the indel pattern consists of the top five indels, by frequency of appearance. In an embodiment, the indel pattern consists of the indels which are present at greater than about 5% frequency relative to all sequencing reads. In an embodiment, the indel pattern consists of the indels which are present at greater than about 10% frequency relative to to total number of indel sequencing reads (i.e., those reads that do not consist of the unmodified reference nucleic acid sequence). In an embodiment, the indel pattern includes of any 3 of the top five most frequently observed indels. The indel pattern may be determined, for example, by sequencing cells of a population of cells which were exposed to the gRNA molecule.

[0279] An “off-target indel,” as the term I used herein, refers to an indel at or near a site other than the target sequence of the targeting domain of the gRNA molecule. Such sites may comprise, for example, 1, 2, 3, 4, 5 or more mismatch nucleotides relative to the sequence of the targeting domain of the gRNA. In exemplary embodiments, such sites are detected using targeted sequencing of in silico predicted off-target sites, or by an insertional method known in the art.

[0280] The term “a” and “an” refers to one or to more than one (i.e., to at least one) of the grammatical object of the article. By way of example, “an element” means one element or more than one element.

[0281] The term “about” when referring to a measurable value such as an amount, a temporal duration, and the like, is meant to encompass variations of ±20% or in some instances ±10%, or in some instances ±5%, or in some instances ±1%, or in some instances ±0.1% from the specified value, as such variations are appropriate to perform the disclosed methods.

[0282] The term “antigen” or “Ag” refers to a molecule that provokes an immune response. This immune response may involve either antibody production, or the activation of specific immunologically-competent cells, or both. The skilled artisan will understand that any macromolecule, including virtually all proteins or peptides, can serve as an antigen. Furthermore, antigens can be derived from recombinant or genomic DNA. A skilled artisan will understand that any DNA, which comprises a nucleotide sequences or a partial nucleotide sequence encoding a protein that elicits an immune response therefore encodes an “antigen” as that term is used herein. Furthermore, one skilled in the art will understand that an antigen need not be encoded solely by a full length nucleotide sequence of a gene. It is readily apparent that the present invention includes, but is not limited to, the use of partial nucleotide sequences of more than one gene and that these nucleotide sequences are arranged in various combinations to encode polypeptides that elicit the desired immune response. Moreover, a skilled artisan will understand that an antigen need not be encoded by a “gene” at all. It is readily apparent that an antigen can be synthesized or can be derived from a biological sample, or might be macromolecule besides a polypeptide. Such a biological sample can include, but is not limited to a tissue sample, a cell or a fluid with other biological components.

[0283] The term “autologous” refers to any material derived from the same individual into whom it is later to be re-introduced.

[0284] The term “allogeneic” refers to any material derived from a different animal of the same species as the individual to whom the material is introduced. Two or more individuals are said to be allogeneic to one another when the genes at one or more loci are not identical. In some aspects, allogeneic material from individuals of the same species may be sufficiently unlike genetically to interact antigenically

[0285] The term “xenogeneic” refers to a graft derived from an animal of a different species.

[0286] “Derived from” as that term is used herein, indicates a relationship between a first and a second molecule. It generally refers to structural similarity between the first molecule and a second molecule and does not connotate or include a process or source limitation on a first molecule that is derived from a second molecule.

[0287] The term “encoding” refers to the inherent property of specific sequences of nucleotides in a polynucleotide, such as a gene, a cDNA, or an mRNA, to serve as templates for synthesis of other polymers and macromolecules in biological processes having either a defined sequence of nucleotides (e.g., rRNA, tRNA and mRNA) or a defined sequence of amino acids and the biological properties resulting therefrom. Thus, a gene, cDNA, or RNA, encodes a protein if transcription and translation of mRNA corresponding to that gene produces the protein in a cell or other biological system. Both the coding strand, the nucleotide sequence of which is identical to the mRNA sequence and is usually provided in sequence listings, and the non-coding strand, used as the template for transcription of a gene or cDNA, can be referred to as encoding the protein or other product of that gene or cDNA.

[0288] Unless otherwise specified, a “nucleotide sequence encoding an amino acid sequence” includes all nucleotide sequences that are degenerate versions of each other and that encode the same amino acid sequence. The phrase nucleotide sequence that encodes a protein or a RNA may also include introns to the extent that the nucleotide sequence encoding the protein may in some version contain an intron(s).

[0289] The term “effective amount” or “therapeutically effective amount” are used interchangeably herein, and refer to an amount of a compound, formulation, material, or composition, as described herein effective to achieve a particular biological result.

[0290] The term “endogenous” refers to any material from or produced inside an organism, cell, tissue or system.

[0291] The term “exogenous” refers to any material introduced from or produced outside an organism, cell, tissue or system.

[0292] The term “expression” refers to the transcription and/or translation of a particular nucleotide sequence driven by a promoter.

[0293] The term “transfer vector” refers to a composition of matter which comprises an isolated nucleic acid and which can be used to deliver the isolated nucleic acid to the interior of a cell. Numerous vectors are known in the art including, but not limited to, linear polynucleotides, polynucleotides associated with ionic or amphiphilic compounds, plasmids, and viruses. Thus, the term “transfer vector” includes an autonomously replicating plasmid or a virus. The term should also be construed to further include non-plasmid and non-viral compounds which facilitate transfer of nucleic acid into cells, such as, for example, a polylysine compound, liposome, and the like. Examples of viral transfer vectors include, but are not limited to, adenoviral vectors, adeno-associated virus vectors, retroviral vectors, lentiviral vectors, and the like.

[0294] The term “expression vector” refers to a vector comprising a recombinant polynucleotide comprising expression control sequences operatively linked to a nucleotide sequence to be expressed. An expression vector comprises sufficient cis-acting elements for expression; other elements for expression can be supplied by the host cell or in an in vitro expression system. Expression vectors include all those known in the art, including cosmids, plasmids (e.g., naked or contained in liposomes) and viruses (e.g., lentiviruses, retroviruses, adenoviruses, and adeno-associated viruses) that incorporate the recombinant polynucleotide.

[0295] The term “homologous” or “identity” refers to the subunit sequence identity between two polymeric molecules, e.g., between two nucleic acid molecules, such as, two DNA molecules or two RNA molecules, or between two polypeptide molecules. When a subunit position in both of the two molecules is occupied by the same monomeric subunit; e.g., if a position in each of two DNA molecules is occupied by adenine, then they are homologous or identical at that position. The homology between two sequences is a direct function of the number of matching or homologous positions; e.g., if half (e.g., five positions in a polymer ten subunits in length) of the positions in two sequences are homologous, the two sequences are 50% homologous; if 90% of the positions (e.g., 9 of 10), are matched or homologous, the two sequences are 90% homologous.

[0296] The term “isolated” means altered or removed from the natural state. For example, a nucleic acid or a peptide naturally present in a living animal is not “isolated,” but the same nucleic acid or peptide partially or completely separated from the coexisting materials of its natural state is “isolated.” An isolated nucleic acid or protein can exist in substantially purified form, or can exist in a non-native environment such as, for example, a host cell.

[0297] The term “operably linked” or “transcriptional control” refers to functional linkage between a regulatory sequence and a heterologous nucleic acid sequence resulting in expression of the latter. For example, a first nucleic acid sequence is operably linked with a second nucleic acid sequence when the first nucleic acid sequence is placed in a functional relationship with the second nucleic acid sequence. For instance, a promoter is operably linked to a coding sequence if the promoter affects the transcription or expression of the coding sequence. Operably linked DNA sequences can be contiguous with each other and, e.g., where necessary to join two protein coding regions, are in the same reading frame.

[0298] The term “parenteral” administration of an immunogenic composition includes, e.g., subcutaneous (s.c.), intravenous (i.v.), intramuscular (i.m.), or intrasternal injection, intratumoral, or infusion techniques.

[0299] The term “nucleic acid” or “polynucleotide” refers to deoxyribonucleic acids (DNA) or ribonucleic acids (RNA) and polymers thereof in either single- or double-stranded form. Unless specifically limited, the term encompasses nucleic acids containing known analogues of natural nucleotides that have similar binding properties as the reference nucleic acid and are metabolized in a manner similar to naturally occurring nucleotides. Unless otherwise indicated, a particular nucleic acid sequence also implicitly encompasses conservatively modified variants thereof (e.g., degenerate codon substitutions), alleles, orthologs, SNPs, and complementary sequences as well as the sequence explicitly indicated. Specifically, degenerate codon substitutions may be achieved by generating sequences in which the third position of one or more selected (or all) codons is substituted with mixed-base and/or deoxyinosine residues (Batzer et al., Nucleic Acid Res. 19:5081 (1991); Ohtsuka et al., J. Biol. Chem. 260:2605-2608 (1985); and Rossolini et al., Mol. Cell. Probes 8:91-98 (1994)).

[0300] The terms “peptide,” “polypeptide,” and “protein” are used interchangeably, and refer to a compound comprised of amino acid residues covalently linked by peptide bonds. A protein or peptide must contain at least two amino acids, and no limitation is placed on the maximum number of amino acids that can comprise a protein's or peptide's sequence. Polypeptides include any peptide or protein comprising two or more amino acids joined to each other by peptide bonds. As used herein, the term refers to both short chains, which also commonly are referred to in the art as peptides, oligopeptides and oligomers, for example, and to longer chains, which generally are referred to in the art as proteins, of which there are many types. “Polypeptides” include, for example, biologically active fragments, substantially homologous polypeptides, oligopeptides, homodimers, heterodimers, variants of polypeptides, modified polypeptides, derivatives, analogs, fusion proteins, among others. A polypeptide includes a natural peptide, a recombinant peptide, or a combination thereof.

[0301] The term “promoter” refers to a DNA sequence recognized by the synthetic machinery of the cell, or introduced synthetic machinery, required to initiate the specific transcription of a polynucleotide sequence.

[0302] The term “promoter/regulatory sequence” refers to a nucleic acid sequence which is required for expression of a gene product operably linked to the promoter/regulatory sequence. In some instances, this sequence may be the core promoter sequence and in other instances, this sequence may also include an enhancer sequence and other regulatory elements which are required for expression of the gene product. The promoter/regulatory sequence may, for example, be one which expresses the gene product in a tissue specific manner.

[0303] The term “constitutive” promoter refers to a nucleotide sequence which, when operably linked with a polynucleotide which encodes or specifies a gene product, causes the gene product to be produced in a cell under most or all physiological conditions of the cell.

[0304] The term “inducible” promoter refers to a nucleotide sequence which, when operably linked with a polynucleotide which encodes or specifies a gene product, causes the gene product to be produced in a cell substantially only when an inducer which corresponds to the promoter is present in the cell.

[0305] The term “tissue-specific” promoter refers to a nucleotide sequence which, when operably linked with a polynucleotide encodes or specified by a gene, causes the gene product to be produced in a cell substantially only if the cell is a cell of the tissue type corresponding to the promoter.

[0306] As used herein in connection with a messenger RNA (mRNA), a 5′ cap (also termed an RNA cap, an RNA 7-methylguanosine cap or an RNA m7G cap) is a modified guanine nucleotide that has been added to the “front” or 5′ end of a eukaryotic messenger RNA shortly after the start of transcription. The 5′ cap consists of a terminal group which is linked to the first transcribed nucleotide. Its presence is critical for recognition by the ribosome and protection from RNases. Cap addition is coupled to transcription, and occurs co-transcriptionally, such that each influences the other. Shortly after the start of transcription, the 5′ end of the mRNA being synthesized is bound by a cap-synthesizing complex associated with RNA polymerase. This enzymatic complex catalyzes the chemical reactions that are required for mRNA capping. Synthesis proceeds as a multi-step biochemical reaction. The capping moiety can be modified to modulate functionality of mRNA such as its stability or efficiency of translation.

[0307] As used herein, “in vitro transcribed RNA” refers to RNA, preferably mRNA, that has been synthesized in vitro. Generally, the in vitro transcribed RNA is generated from an in vitro transcription vector. The in vitro transcription vector comprises a template that is used to generate the in vitro transcribed RNA.

[0308] As used herein, a “poly(A)” is a series of adenosines attached by polyadenylation to the mRNA. In the preferred embodiment of a construct for transient expression, the polyA is between 50 and 5000 (SEQ ID NO: 6596), preferably greater than 64, more preferably greater than 100, most preferably greater than 300 or 400. poly(A) sequences can be modified chemically or enzymatically to modulate mRNA functionality such as localization, stability or efficiency of translation.

[0309] As used herein, “polyadenylation” refers to the covalent linkage of a polyadenylyl moiety, or its modified variant, to a messenger RNA molecule. In eukaryotic organisms, most messenger RNA (mRNA) molecules are polyadenylated at the 3′ end. The 3′ poly(A) tail is a long sequence of adenine nucleotides (often several hundred) added to the pre-mRNA through the action of an enzyme, polyadenylate polymerase. In higher eukaryotes, the poly(A) tail is added onto transcripts that contain a specific sequence, the polyadenylation signal. The poly(A) tail and the protein bound to it aid in protecting mRNA from degradation by exonucleases. Polyadenylation is also important for transcription termination, export of the mRNA from the nucleus, and translation. Polyadenylation occurs in the nucleus immediately after transcription of DNA into RNA, but additionally can also occur later in the cytoplasm. After transcription has been terminated, the mRNA chain is cleaved through the action of an endonuclease complex associated with RNA polymerase. The cleavage site is usually characterized by the presence of the base sequence AAUAAA near the cleavage site. After the mRNA has been cleaved, adenosine residues are added to the free 3′ end at the cleavage site.

[0310] As used herein, “transient” refers to expression of a non-integrated transgene for a period of hours, days or weeks, wherein the period of time of expression is less than the period of time for expression of the gene if integrated into the genome or contained within a stable plasmid replicon in the host cell.

[0311] As used herein, the terms “treat”, “treatment” and “treating” refer to the reduction or amelioration of the progression, severity and/or duration of a disorder, e.g., a hemoglobinopathy, or the amelioration of one or more symptoms (preferably, one or more discernible symptoms) of a disorder, e.g., a hemoglobinopathy, resulting from the administration of one or more therapies (e.g., one or more therapeutic agents such as a gRNA molecule, CRISPR system, or modified cell of the invention). In specific embodiments, the terms “treat”, “treatment” and “treating” refer to the amelioration of at least one measurable physical parameter of a hemoglobinopathy disorder, not discernible by the patient. In other embodiments the terms “treat”, “treatment” and “treating” refer to the inhibition of the progression of a disorder, either physically by, e.g., stabilization of a discernible symptom, physiologically by, e.g., stabilization of a physical parameter, or both. In other embodiments the terms “treat”, “treatment” and “treating” refer to the reduction or stabilization of a symptom of a hemoglobinopathy, e.g., sickle cell disease or beta-thalassemia.

[0312] The term “signal transduction pathway” refers to the biochemical relationship between a variety of signal transduction molecules that play a role in the transmission of a signal from one portion of a cell to another portion of a cell. The phrase “cell surface receptor” includes molecules and complexes of molecules capable of receiving a signal and transmitting signal across the membrane of a cell.

[0313] The term “subject” is intended to include living organisms in which an immune response can be elicited (e.g., mammals, human).

[0314] The term, a “substantially purified” cell refers to a cell that is essentially free of other cell types. A substantially purified cell also refers to a cell which has been separated from other cell types with which it is normally associated in its naturally occurring state. In some instances, a population of substantially purified cells refers to a homogenous population of cells. In other instances, this term refers simply to cell that have been separated from the cells with which they are naturally associated in their natural state. In some aspects, the cells are cultured in vitro. In other aspects, the cells are not cultured in vitro.

[0315] The term “therapeutic” as used herein means a treatment. A therapeutic effect is obtained by reduction, suppression, remission, or eradication of a disease state.

[0316] The term “prophylaxis” as used herein means the prevention of or protective treatment for a disease or disease state.

[0317] The term “transfected” or “transformed” or “transduced” refers to a process by which exogenous nucleic acid and/or protein is transferred or introduced into the host cell. A “transfected” or “transformed” or “transduced” cell is one which has been transfected, transformed or transduced with exogenous nucleic acid and/or protein. The cell includes the primary subject cell and its progeny.

[0318] The term “specifically binds,” refers to a molecule recognizing and binding with a binding partner (e.g., a protein or nucleic acid) present in a sample, but which molecule does not substantially recognize or bind other molecules in the sample.

[0319] The term “bioequivalent” refers to an amount of an agent other than the reference compound, required to produce an effect equivalent to the effect produced by the reference dose or reference amount of the reference compound.

[0320] “Refractory” as used herein refers to a disease, e.g., a hemoglobinopathy, that does not respond to a treatment. In embodiments, a refractory hemoglobinopathy can be resistant to a treatment before or at the beginning of the treatment. In other embodiments, the refractory hemoglobinopathy can become resistant during a treatment. A refractory hemoglobinopathy is also called a resistant hemoglobinopathy.

[0321] “Relapsed” as used herein refers to the return of a disease (e.g., hemoglobinopathy) or the signs and symptoms of a disease such as a hemoglobinopathy after a period of improvement, e.g., after prior treatment of a therapy, e.g., hemoglobinopathy therapy.

[0322] Ranges: throughout this disclosure, various aspects of the invention can be presented in a range format. It should be understood that the description in range format is merely for convenience and brevity and should not be construed as an inflexible limitation on the scope of the invention. Accordingly, the description of a range should be considered to have specifically disclosed all the possible subranges as well as individual numerical values within that range. For example, description of a range such as from 1 to 6 should be considered to have specifically disclosed subranges such as from 1 to 3, from 1 to 4, from 1 to 5, from 2 to 4, from 2 to 6, from 3 to 6 etc., as well as individual numbers within that range, for example, 1, 2, 2.7, 3, 4, 5, 5.3, and 6. As another example, a range such as 95-99% identity, includes something with 95%, 96%, 97%, 98% or 99% identity, and includes subranges such as 96-99%, 96-98%, 96-97%, 97-99%, 97-98% and 98-99% identity. This applies regardless of the breadth of the range.

[0323] The term “BCL11a” refers to B-cell lymphoma/leukemia 11A, a RNA polymerase II core promoter proximal region sequence-specific DNA binding protein, and the gene encoding said protein, together with all introns and exons. This gene encodes a C2H2 type zinc-finger protein. BCL11A has been found to play a role in the suppression of fetal hemoglobin production. BCL11a is also known as B-Cell CLL/Lymphoma 11A (Zinc Finger Protein), CTIP1, EVI9, Ecotropic Viral Integration Site 9 Protein Homolog, COUP-TF-Interacting Protein 1, Zinc Finger Protein 856, KIAA1809, BCL-11A, ZNF856, EVI-9, and B-Cell CLL/Lymphoma 11A. The term encompasses all isoforms and splice variants of BLC11a. The human gene encoding BCL11a is mapped to chromosomal location 2p16.1 (by Ensembl).

[0324] The human and murine amino acid and nucleic acid sequences can be found in a public database, such as GenBank, UniProt and Swiss-Prot., and the genomic sequence of human BCL11a can be found in GenBank at NC_000002.12. The BCL11a gene refers to this genomic location, including all introns and exons. There are multiple known isotypes of BCL11a.

[0325] The sequence of mRNA encoding isoform 1 of human BCL11a can be found at NM_022893.

[0326] The peptide sequence of isoform 1 of human BCL11a (SEQ ID NO: 2005) is:

```
                10 20 30 40
MSRRKQGKPQ HLSKREFSPE PLEAILTDDE PDHGPLGAPE
                50 60 70 80
GDHDLLTCGQ CQMNFPLGDI LIFIEHKRKQ CNGSLCLEKA
                90 100 110 120
VDKPPSPSPI EMKKASNPVE VGIQVTPEDD DCLSTSSRGI
              130 140 150 160
CPKQEHIADK LLHWRGLSSP RSAHGALIPT PGMSAEYAPQ
              170 180 190 200
GICKDEPSSY TCTTCKQPFT SAWFLLQHAQ NTHGLRIYLE
              210 220 230 240
SEHGSPLTPR VGIPSGLGAE CPSQPPLHGI HIADNNPFNL
              250 260 270 280
LRIPGSVSRE ASGLAEGRFP PTPPLFSPPP RHHLDPHRIE
              290 300 310 320
RLGAEEMALA THHPSAFDRV LRLNPMAMEP PAMDFSRRLR
              330 340 350 360
ELAGNTSSPP LSPGRPSPMQ RLLQPFQPGS KPPFLATPPL
              370 380 390 400
PPLQSAPPPS QPPVKSKSCE FCGKTFKFQS NLVVHRRSHT
              410 420 430 440
GEKPYKCNLC DHACTQASKL KRHMKTHMHK SSPMTVKSDD
              450 460 470 480
GLSTASSPEP GTSDLVGSAS SALKSVVAKF KSENDPNLIP
              490 500 510 520
ENGDEEEEED DEEEEEEEEE EEEELTESER VDYGFGLSLE
              530 540 550 560
AARHHENSSR GAVVGVGDES RALPDVMQGM VLSSMQHFSE
              570 580 590 600
AFHQVLGEKH KRGHLAEAEG HRDTCDEDSV AGESDRIDDG
              610 620 630 640
TVNGRGCSPG ESASGGLSKK LLLGSPSSLS PFSKRIKLEK
              650 660 670 680
EFDLPPAAMP NTENVYSQWL AGYAASRQLK DPFLSFGDSR
              690 700 710 720
QSPFASSSEH SSENGSLRFS TPPGELDGGI SGRSGTGSGG
              730 740 750 760
STPHISGPGP GRPSSKEGRR SDTCEYCGKV FKNCSNLTVH
              770 780 790 800
RRSHTGERPY KCELCNYACA QSSKLTRHMK THGQVGKDVY
              810 820 830
KCEICKMPFS VYSTLEKHMK KWHSDRVLNN DIKTE
```

[0327] SEQ ID NO: 21-1 (Identifier Q9H165-1; and NM_022893.3; and accession ADL14508.1).

[0328] The sequences of other BCL11a protein isoforms are provided at:
[0329] Isoform 2: Q9H165-2
[0330] Isoform 3: Q9H165-3
[0331] Isoform 4: Q9H165-4
[0332] Isoform 5: Q9H165-5
[0333] Isoform 6: Q9H165-6

[0334] As used herein, a human BCL11a protein also encompasses proteins that have over its full length at least about 70%, 71%, 72%, 73%, 74%, 75%, 76%, 77%, 78%, 79%, 80%, 81%, 82%, 83%, 84%, 85%, 86%, 87%, 88%, 89%, 90%, 91%, 92%, 93%, 94%, 95%, 96%, 97%, 98%, 99% or 100% sequence identity with BCL11a isoform 1-6, wherein such proteins still have at least one of the functions of BCL11a.

[0335] The term “globin locus” as used herein refers to the region of human chromosome 11 comprising genes for embryonic (ε), fetal (G(γ) and A(γ)), adult globin genes (γ and β), locus control regions and DNase I hypersensitivity sites.

[0336] The term “complementary” as used in connection with nucleic acid, refers to the pairing of bases, A with T or U, and G with C. The term complementary refers to nucleic acid molecules that are completely complementary, that is, form A to T or U pairs and G to C pairs across the entire reference sequence, as well as molecules that are at least 80%, 85%, 90%, 95%, 99% complementary.

[0337] The term “HPFH” refers to hereditary persistence of fetal hemoglobin, and is characterized in increased fetal hemoglobin in adult red blood cells. The term “HPFH region” refers to a genomic site which, when modified (e.g., mutated or deleted), causes increased HbF production in adult red blood cells, and includes HPFH sites identified in the literature (see e.g., the Online Mendelian Inheritance in Man: http://www.omim.org/entry/141749). In an exemplary embodiment, the HPFH region is a region within or encompassing the beta globin gene cluster on chromosome 11p15. In an exemplary embodiment, the HPFH region is within or encompasses at least part of the delta globin gene. In an exemplary embodiment, the HPFH region is a region of the promoter of HBG1. In an exemplary embodiment, the HPFH region is a region of the promoter of HBG1. In an exemplary embodiment, the HPFH region is a region described in Sankaran V G et al. NEJM (2011) 365:807-814. In an exemplary embodiment, the HPFH region is the French breakpoint deletional HPFH as described in Sankaran V G et al. NEJM (2011) 365:807-814. In an exemplary embodiment, the HPFH region is the Algerian HPFH as described in Sankaran V G et al. NEJM (2011) 365:807-814. In an exemplary embodiment, the HPFH region is the Sri Lankan HPFH as described in Sankaran V G et al. NEJM (2011) 365:807-814. In an exemplary embodiment, the HPFH region is the HPFH-3 as described in Sankaran V G et al. NEJM (2011) 365:807-814. In an exemplary embodiment, the HPFH region is the HPFH-2 as described in Sankaran V G et al. NEJM (2011) 365:807-814. In an embodiment, the HPFH-1 region is the HPFH-3 as described in Sankaran V G et al. NEJM (2011) 365:807-814. In an exemplary embodiment, the HPFH region is the Sri Lankan (δβ)⁰-thalassemia HPFH as described in Sankaran V G et al. NEJM (2011) 365:807-814. In an exemplary embodiment, the HPFH region is the Sicilian (δβ)⁰-thalassemia HPFH as described in Sankaran V G et al. NEJM (2011) 365:807-814. In an exemplary embodiment, the HPFH region is the Macedonian (δβ)⁰-thalassemia HPFH as described in Sankaran V G et al. NEJM (2011) 365:807-814. In an exemplary embodiment, the HPFH region is the Kurdish β⁰-thalassemia HPFH as described in Sankaran V G et al. NEJM (2011) 365:807-814. In an exemplary embodiment, the HPFH region is the region located at Chr11:5213874-5214400 (hg18). In an exemplary embodiment, the HPFH region is the region located at Chr11:5215943-5215046 (hg18). In an exemplary embodiment, the HPFH region is the region located at Chr11:5234390-5238486 (hg38).

[0338] “BCL11a enhancer” as the term is used herein, refers to nucleic acid sequence which affects, e.g., enhances, expression or function of BCL11a. See e.g., Bauer et al., Science, vol. 342, 2013, pp. 253-257. The BCL11a enhancer may be, for example, operative only in certain cell types, for example, cells of the erythroid lineage. One example of a BCL11a enhancer is the nucleic acid sequence between exon 2 and exon 3 of the BCL11a gene gene (e.g., the nucleic acid at or corresponding to positions +55: Chr2:60497676-60498941; +58: Chr2:60494251-60495546; +62: Chr2:60490409-60491734 as recorded in hg38). In an embodiment, the BCL11a Enhancer is the +62 region of the nucleic acid sequence between exon 2 and exon 3 of the BCL11a gene. In an embodiment, the BCL11a Enhancer is the +58 region of the nucleic acid sequence between exon 2 and exon 3 of the BCL11a gene. In an embodiment, the BCL11a Enhancer is the +55 region of the nucleic acid sequence between exon 2 and exon 3 of the BCL11a gene.

[0339] The terms “hematopoietic stem and progenitor cell” or “HSPC” are used interchangeably, and refer to a population of cells comprising both hematopoietic stem cells (“HSCs”) and hematopoietic progenitor cells (“HPCs”). Such cells are characterized, for example, as CD34+. In exemplary embodiments, HSPCs are isolated from bone marrow. In other exemplary embodiments, HSPCs are isolated from peripheral blood. In other exemplary embodiments, HSPCs are isolated from umbilical cord blood.

[0340] “Stem cell expander” as used herein refers to a compound which causes cells, e.g., HSPCs, HSCs and/or HPCs to proliferate, e.g., increase in number, at a faster rate relative to the same cell types absent said agent. In one exemplary aspect, the stem cell expander is an inhibitor of the aryl hydrocarbon receptor pathway. Additional examples of stem cell expanders are provided below. In embodiments, the proliferation, e.g., increase in number, is accomplished ex vivo.

[0341] “Engrafnment” or “engraft” refers to the incorporation of a cell or tissue, e.g., a population of HSPCs, into the body of a recipient, e.g., a mammal or human subject. In one example, engraftment includes the growth, expansion and/or differentiation of the engrafted cells in the recipient. In an example, engraftment of HSPCs includes the differentiation and growth of said HSPCs into erythroid cells within the body of the recipient.

[0342] The term “Hematopoietic progenitor cells” (HPCs) as used herein refers to primitive hematopoietic cells that have a limited capacity for self-renewal and the potential for multilineage differentiation (e.g., myeloid, lymphoid), mono-lineage differentiation (e.g., myeloid or lymphoid) or cell-type restricted differentiation (e.g., erythroid progenitor) depending on placement within the hematopoietic hierarchy (Doulatov et al., Cell Stem Cell 2012).

[0343] “Hematopoietic stem cells” (HSCs) as used herein refer to immature blood cells having the capacity to self-renew and to differentiate into more mature blood cells comprising granulocytes (e.g., promyelocytes, neutrophils, eosinophils, basophils), erythrocytes (e.g., reticulocytes, erythrocytes), thrombocytes (e.g., megakaryoblasts, platelet producing megakaryocytes, platelets), and monocytes (e.g., monocytes, macrophages). HSCs are interchangeably described as stem cells throughout the specification. It is known in the art that such cells may or may not include CD34+ cells. CD34+ cells are immature cells that express the CD34 cell surface marker. CD34+ cells are believed to include a subpopulation of cells with the stem cell properties defined above. It is well known in the art that HSCs are multipotent cells that can give rise to primitive progenitor cells (e.g., multipotent progenitor cells) and/or progenitor cells committed to specific hematopoietic lineages (e.g., lymphoid progenitor cells). The stem cells committed to specific hematopoietic lineages may be of T cell lineage, B cell lineage, dendritic cell lineage, Langerhans cell lineage and/or lymphoid tissue-specific macrophage cell lineage. In addition, HSCs also refer to long term HSC (LT-HSC) and short term HSC (ST-HSC). ST-HSCs are more active and more proliferative than LT-HSCs. However, LT-HSC have unlimited self renewal (i.e., they survive throughout adulthood), whereas ST-HSC have limited self renewal (i.e., they survive for only a limited period of time). Any of these HSCs can be used in any of the methods described herein. Optionally, ST-HSCs are useful because they are highly proliferative and thus, quickly increase the number of HSCs and their progeny. Hematopoietic stem cells are optionally obtained from blood products. A blood product includes a product obtained from the body or an organ of the body containing cells of hematopoietic origin. Such sources include un-fractionated bone marrow, umbilical cord, peripheral blood (e.g., mobilized peripheral blood, e.g., mobilized with a mobilization agent such as G-CSF or Plerixafor® (AMD3100)), liver, thymus, lymph and spleen. All of the aforementioned crude or un-fractionated blood products can be enriched for cells having hematopoietic stem cell characteristics in ways known to those of skill in the art. In an embodiment, HSCs are characterized as CD34+/CD38−/CD90+/CD45RA−. In embodiments, the HSC s are characterized as CD34+/CD90+/CD49f+ cells.

[0344] “Expansion” or “Expand” in the context of cells refers to an increase in the number of a characteristic cell type, or cell types, from an initial cell population of cells, which may or may not be identical. The initial cells used for expansion may not be the same as the cells generated from expansion.

[0345] “Cell population” refers to eukaryotic mammalian, preferably human, cells isolated from biological sources, for example, blood product or tissues and derived from more than one cell.

[0346] “Enriched” when used in the context of cell population refers to a cell population selected based on the presence of one or more markers, for example, CD34+.

[0347] The term “CD34+ cells” refers to cells that express at their surface CD34 marker. CD34+ cells can be detected and counted using for example flow cytometry and fluorescently labeled anti-CD34 antibodies.

[0348] “Enriched in CD34+ cells” means that a cell population has been selected based on the presence of CD34 marker. Accordingly, the percentage of CD34+ cells in the cell population after selection method is higher than the percentage of CD34+ cells in the initial cell population before selecting step based on CD34 markers. For example, CD34+ cells may represent at least 50%, 60%, 70%, 80% or at least 90% of the cells in a cell population enriched in CD34+ cells.

[0349] The terms “F cell” and “F-cell” refer to cells, usually erythrocytes (e.g., red blood cells) which contain and/or produce (e.g., express) fetal hemoglobin. For example, an F-cell is a cell that contains or produces detectible levels of fetal hemoglobin. For example, an F-cell is a cell that contains or produces at least 5 picograms of fetal hemoglobin. In another example, an F-cell is a cell that contains or produces at least 6 picograms of fetal hemoglobin. In another example, an F-cell is a cell that contains or produces at least 7 picograms of fetal hemoglobin. In another example, an F-cell is a cell that contains or produces at least 8 picograms of fetal hemoglobin. In another example, an F-cell is a cell that contains or produces at least 9 picograms of fetal hemoglobin. In another example, an F-cell is a cell that contains or produces at least 10 picograms of fetal hemoglobin. Levels of fetal hemoglobin may be measured using an assay described herein or by other method known in the art, for example, flow cytometry using an anti-fetal hemoglobin detection reagent, high performance liquid chromatography, mass spectrometry, or enzyme-linked immunoabsorbent assay.

[0350] Unless otherwise stated, all genome or chromosome coordinates are are according to hg38.

### DETAILED DESCRIPTION

[0351] The gRNA molecules, compositions and methods described herein relate to genome editing in eukaryotic cells using the CRISPR/Cas9 system. In particular, the gRNA molecules, compositions and methods described herein relate to regulation of globin levels and are useful, for example, in regulating expression and production of globin genes and protein. The gRNA molecules, compositions and methods can be useful in the treatment of hemoglobinopathies.

[0352] I. gRNA Molecules

[0353] A gRNA molecule may have a number of domains, as described more fully below, however, a gRNA molecule typically comprises at least a crRNA domain (comprising a targeting domain) and a tracr. The gRNA molecules of the invention, used as a component of a CRISPR system, are useful for modifying (e.g., modifying the sequence) DNA at or near a target site. Such modifications include deletions and or insertions that result in, for example, reduced or eliminated expression of a functional product of the gene comprising the target site. These uses, and additional uses, are described more fully below.

[0354] In an embodiment, a unimolecular, or sgRNA comprises, preferably from 5′ to 3′: a crRNA (which contains a targeting domain complementary to a target sequence and a region that forms part of a flagpole (i.e., a crRNA flagpole region)); a loop; and a tracr (which contains a domain complementary to the crRNA flagpole region, and a domain which additionally binds a nuclease or other effector molecule, e.g., a Cas molecule, e.g., aCas9 molecule), and may take the following format (from 5′ to 3′):
[0355] [targeting domain]-[crRNA flagpole region]-[optional first flagpole extension]-[loop]-[optional first tracr extension]-[tracr flagpole region]-[tracr nuclease binding domain].

[0356] In embodiments, the tracr nuclease binding domain binds to a Cas protein, e.g., a Cas9 protein.

[0357] In an embodiment, a bimolecular, or dgRNA comprises two polynucleotides; the first, preferably from 5′ to 3′: a crRNA (which contains a targeting domain complementary to a target sequence and a region that forms part of a flagpole; and the second, preferrably from 5′ to 3′: a tracr (which contains a domain complementary to the crRNA flagpole region, and a domain which additionally binds a nuclease or other effector molecule, e.g., a Cas molecule, e.g., Cas9 molecule), and may take the following format (from 5′ to 3′):
[0358] Polynucleotide 1 (crRNA): [targeting domain]-[crRNA flagpole region]-[optional first flagpole extension]-[optional second flagpole extension]
[0359] Polynucleotide 2 (tracr): [optional first tracr extension]-[tracr flagpole region]-[tracr nuclease binding domain]

[0360] In embodiments, the tracr nuclease binding domain binds to a Cas protein, e.g., a Cas9 protein.

[0361] In some aspects, the targeting domain comprises or consists of a targeting domain sequence described herein, e.g., a targeting domain described in Table 1, 2, 3, 4, 5, or 6, or a targeting domain comprising or consisting of 17, 18, 19, 20, 21, 22, 23, 24, or 25 (preferably 20) consecutive nucleotides of a targeting domain sequence described in Table 1, 2, 3, 4, 5, or 6.

[0362] In some aspects, the flagpole, e.g., the crRNA flagpole region, comprises, from 5′ to 3′: GUUUUAGAGCUA (SEQ ID NO: 6584).

[0363] In some aspects, the flagpole, e.g., the crRNA flagpole region, comprises, from 5′ to 3′: GUUUAAGAGCUA (SEQ ID NO: 6585).

[0364] In some aspects the loop comprises, from 5′ to 3′: GAAA (SEQ ID NO: 6588).

[0365] In some aspects the tracr comprises, from 5′ to 3′: UAGCAAGUUAAAAUAAGGCUAGUCCGUUAUCAACUUGAAAAAGUGGCACCGAGUCGGUG C (SEQ ID NO: 6589) and is preferably used in a gRNA molecule comprising SEQ ID NO 6584.

[0366] In some aspects the tracr comprises, from 5′ to 3′: UAGCAAGUUUAAAUAAGGCUAGUCCGUUAUCAACUUGAAAAAGUGGCACCGAGUCGGUG C (SEQ ID NO: 6590) and is preferably used in a gRNA molecule comprising SEQ ID NO 6585.

[0367] In some aspects, the gRNA may also comprise, at the 3′ end, additional U nucleic acids. For example the gRNA may comprise an additional 1, 2, 3, 4, 5, 6, 7, 8, 9, or 10 U nucleic acids at the 3′ end. In an embodiment, the gRNA comprises an additional 4 U nucleic acids at the 3′ end. In the case of dgRNA, one or more of the polynucleotides of the dgRNA (e.g., the polynucleotide comprising the targeting domain and the polynucleotide comprising the tracr) may comprise, at the 3′ end, additional U nucleic acids. For example, the case of dgRNA, one or more of the polynucleotides of the dgRNA (e.g., the polynucleotide comprising the targeting domain and the polynucleotide comprising the tracr) may comprise an additional 1, 2, 3, 4, 5, 6, 7, 8, 9, or 10 U nucleic acids at the 3′ end. In an embodiment, in the case of dgRNA, one or more of the polynucleotides of the dgRNA (e.g., the polynucleotide comprising the targeting domain and the polynucleotide comprising the tracr) comprises an additional 4 U nucleic acids at the 3′ end. In an embodiment of a dgRNA, only the polynucleotide comprising the tracr comprises the additional U nucleic acid(s), e.g., 4 U nucleic acids. In an embodiment of a dgRNA, only the polynucleotide comprising the targeting domain comprises the additional U nucleic acid(s). In an embodiment of a dgRNA, both the polynucleotide comprising the targeting domain and the polynucleotide comprising the tracr comprise the additional U nucleic acids, e.g., 4 U nucleic acids.

[0368] In some aspects, the gRNA may also comprise, at the 3′ end, additional A nucleic acids. For example the gRNA may comprise an additional 1, 2, 3, 4, 5, 6, 7, 8, 9, or 10 A nucleic acids at the 3′ end. In an embodiment, the gRNA comprises an additional 4 A nucleic acids at the 3′ end. In the case of dgRNA, one or more of the polynucleotides of the dgRNA (e.g., the polynucleotide comprising the targeting domain and the polynucleotide comprising the tracr) may comprise, at the 3′ end, additional A nucleic acids. For example, the case of dgRNA, one or more of the polynucleotides of the dgRNA (e.g., the polynucleotide comprising the targeting domain and the polynucleotide comprising the tracr) may comprise an additional 1, 2, 3, 4, 5, 6, 7, 8, 9, or 10 A nucleic acids at the 3′ end. In an embodiment, in the case of dgRNA, one or more of the polynucleotides of the dgRNA (e.g., the polynucleotide comprising the targeting domain and the polynucleotide comprising the tracr) comprises an additional 4 A nucleic acids at the 3′ end. In an embodiment of a dgRNA, only the polynucleotide comprising the tracr comprises the additional A nucleic acid(s), e.g., 4 A nucleic acids. In an embodiment of a dgRNA, only the polynucleotide comprising the targeting domain comprises the additional A nucleic acid(s). In an embodiment of a dgRNA, both the polynucleotide comprising the targeting domain and the polynucleotide comprising the tracr comprise the additional U nucleic acids, e.g., 4 A nucleic acids.

[0369] In embodiments, one or more of the polynucleotides of the gRNA molecule may comprise a cap at the 5′ end.

[0370] In an embodiment, a unimolecular, or sgRNA comprises, preferably from 5′ to 3′: a crRNA (which contains a targeting domain complementary to a target sequence; a crRNA flagpole region; first flagpole extension; a loop; a first tracr extension (which contains a domain complementary to at least a portion of the first flagpole extension); and a tracr (which contains a domain complementary to the crRNA flagpole region, and a domain which additionally binds a Cas9 molecule). In some aspects, the targeting domain comprises a targeting domain sequence described herein, e.g., a targeting domain described in Table 1, 2, 3, 4, 5, or 6, or a targeting domain comprising or consisting of 17, 18, 19, 20, 21, 22, 23, 24, or 25 (preferably 20) consecutive nucleotides of a targeting domain sequence described in Table 1, 2, 3, 4, 5, or 6, for example the 3′ 17, 18, 19, 20, 21, 22, 23, 24 or 25 (preferably 20) consecutive nucleotides of a targeting domain sequence described in Table 1, 2, 3, 4, 5, or 6.

[0371] In aspects comprising a first flagpole extension and/or a first tracr extension, the flagpole, loop and tracr sequences may be as described above. In general any first flagpole extension and first tracr extension may be employed, provided that they are complementary. In embodiments, the first flagpole extension and first tracr extension consist of 3, 4, 5, 6, 7, 8, 9, 10 or more complementary nucleotides.

[0372] In some aspects, the first flagpole extension comprises, from 5′ to 3′: UGCUG (SEQ ID NO: 6586). In some aspects, the first flagpole extension consists of SEQ ID NO: 6586.

[0373] In some aspects, the first tracr extension comprises, from 5′ to 3′: CAGCA (SEQ ID NO: 6591). In some aspects, the first tracr extension consists of SEQ ID NO: 6591.

[0374] In an embodiment, a dgRNA comprises two nucleic acid molecules. In some aspects, the dgRNA comprises a first nucleic acid which contains, preferably from 5′ to 3′: a targeting domain complementary to a target sequence; a crRNA flagpole region; optionally a first flagpole extension; and, optionally, a second flagpole extension; and a second nucleic acid (which may be referred to herein as a tracr), and comprises at least a domain which binds a Cas molecule, e.g., a Cas9 molecule) comprising preferably from 5′ to 3′: optionally a first tracr extension; and a tracr (which contains a domain complementary to the crRNA flagpole region, and a domain which additionally binds a Cas, e.g., Cas9, molecule). The second nucleic acid may additionally comprise, at the 3′ end (e.g., 3′ to the tracr) additional U nucleic acids. For example the tracr may comprise an additional 1, 2, 3, 4, 5, 6, 7, 8, 9, or 10 U nucleic acids at the 3′ end (e.g., 3′ to the tracr). The second nucleic acid may additionally or alternately comprise, at the 3′ end (e.g., 3′ to the tracr) additional A nucleic acids. For example the tracr may comprise an additional 1, 2, 3, 4, 5, 6, 7, 8, 9, or 10 A nucleic acids at the 3′ end (e.g., 3′ to the tracr). In some aspects, the targeting domain comprises a targeting domain sequence described herein, e.g., a targeting domain described in Table 1, 2, 3, 4, 5, or 6, or a targeting domain comprising or consisting of 17, 18, 19, 20, 21, 22, 23, 24, or 25 (preferably 20) consecutive nucleotides of a targeting domain sequence described in Table 1, 2, 3, 4, 5, or 6.

[0375] In aspects involving a dgRNA, the crRNA flagpole region, optional first flagpole extension, optional first tracr extension and tracr sequences may be as described above.

[0376] In some aspects, the optional second flagpole extension comprises, from 5′ to 3′: UUUUG.

[0377] In embodiments, the 3′ 1, 2, 3, 4, or 5 nucleotides, the 5′ 1, 2, 3, 4, or 5 nucleotides, or both the 3′ and 5′ 1, 2, 3, 4, or 5 nucleotides of the gRNA molecule (and in the case of a dgRNA molecule, the polynucleotide comprising the targeting domain and/or the polynucleotide comprising the tracr) are modified nucleic acids, as described more fully in section XIII, below.

[0378] The domains are discussed briefly below:

[0379] 1) The Targeting Domain:

[0380] Guidance on the selection of targeting domains can be found, e.g., in Fu Y el al. NAT BIOTECHNOL 2014 (doi: 10.1038/nbt.2808) and Sternberg S H el al. NATURE 2014 (doi: 10.1038/naturel3011).

[0381] The targeting domain comprises a nucleotide sequence that is complementary, e.g., at least 80, 85, 90, 95, or 99% complementary, e.g., fully complementary, to the target sequence on the target nucleic acid. The targeting domain is part of an RNA molecule and will therefore comprise the base uracil (U), while any DNA encoding the gRNA molecule will comprise the base thymine (T). While not wishing to be bound by theory, it is believed that the complementarity of the targeting domain with the target sequence contributes to specificity of the interaction of the gRNA molecule/Cas9 molecule complex with a target nucleic acid. It is understood that in a targeting domain and target sequence pair, the uracil bases in the targeting domain will pair with the adenine bases in the target sequence.

[0382] In an embodiment, the targeting domain is 5 to 50, e.g., 10 to 40, e.g., 10 to 30, e.g., 15 to 30, e.g., 15 to 25 nucleotides in length. In an embodiment, the targeting domain is 15, 16, 17, 18, 19, 20, 21, 22, 23, 24 or 25 nucleotides in length. In an embodiment, the targeting domain is 16 nucleotides in length. In an embodiment, the targeting domain is 17 nucleotides in length. In an embodiment, the targeting domain is 18 nucleotides in length. In an embodiment, the targeting domain is 19 nucleotides in length. In an embodiment, the targeting domain is 20 nucleotides in length. In an embodiment, the targeting domain is 21 nucleotides in length. In an embodiment, the targeting domain is 22 nucleotides in length. In an embodiment, the targeting domain is 23 nucleotides in length. In an embodiment, the targeting domain is 24 nucleotides in length. In an embodiment, the targeting domain is 25 nucleotides in length. In embodiments, the aforementioned 16, 17, 18, 19, 20, 21, 22, 23, 24, or 25 nucleotides comprise the 5′-16, 17, 18, 19, 20, 21, 22, 23, 24, or 25 nucleotides from a targeting domain described in Table 1, 2, 3, 4, 5, or 6. In embodiments, the aforementioned 16, 17, 18, 19, 20, 21, 22, 23, 24, or 25 nucleotides comprise the 3′-16, 17, 18, 19, 20, 21, 22, 23, 24, or 25 nucleotides from a targeting domain described in Table 1, 2, 3, 4, 5, or 6.

[0383] Without being bound by theory, it is believed that the 8, 9, 10, 11 or 12 nucleic acids of the targeting domain disposed at the 3′ end of the targeting domain is important for targeting the target sequence, and may thus be referred to as the “core” region of the targeting domain. In an embodiment, the core domain is fully complementary with the target sequence.

[0384] The strand of the target nucleic acid with which the targeting domain is complementary is referred to herein as the target sequence. In some aspects, the target sequence is disposed on a chromosome, e.g., is a target within a gene. In some aspects the target sequence is disposed within an exon of a gene. In some aspects the target sequence is disposed within an intron of a gene. In some aspects, the target sequence comprises, or is proximal (e.g., within 10, 20, 30, 40, 50, 100, 200, 300, 400, 500, or 1000 nucleic acids) to a binding site of a regulatory element, e.g., a promoter or transcription factor binding site, of a gene of interest. Some or all of the nucleotides of the domain can have a modification, e.g., modification found in Section XIII herein.

[0385] 2) crRNA Flagpole Region:

[0386] The flagpole contains portions from both the crRNA and the tracr. The crRNA flagpole region is complementary with a portion of the tracr, and in an embodiment, has sufficient complementarity to a portion of the tracr to form a duplexed region under at least some physiological conditions, for example, normal physiological conditions. In an embodiment, the crRNA flagpole region is 5 to 30 nucleotides in length. In an embodiment, the crRNA flagpole region is 5 to 25 nucleotides in length. The crRNA flagpole region can share homology with, or be derived from, a naturally occurring portion of the repeat sequence from a bacterial CRISPR array. In an embodiment, it has at least 50% homology with a crRNA flagpole region disclosed herein, e.g., an S. pyogenes, or S. thermophilus, crRNA flagpole region.

[0387] In an embodiment, the flagpole, e.g., the crRNA flagpole region, comprises SEQ ID NO: 6584. In an embodiment, the flagpole, e.g., the crRNA flagpole region, comprises sequence having at least 50%, 60%, 70%, 80%, 85%, 90%, 95% or 99% homology with SEQ ID NO: 6584. In an embodiment, the flagpole, e.g., the crRNA flagpole region, comprises at least 5, 6, 7, 8, 9, 10, or 11 nucleotides of SEQ ID NO: 6584. In an embodiment, the flagpole, e.g., the crRNA flagpole region, comprises SEQ ID NO: 6585. In an embodiment, the flagpole comprises sequence having at least 50%, 60%, 70%, 80%, 85%, 90%, 95% or 99% homology with SEQ ID NO: 6585. In an embodiment, the flagpole, e.g., the crRNA flagpole region, comprises at least 5, 6, 7, 8, 9, 10, or 11 nucleotides of SEQ ID NO: 6585.

[0388] Some or all of the nucleotides of the domain can have a modification, e.g., modification described in Section XIII herein.

[0389] 3) First Flagpole Extension

[0390] When a tracr comprising a first tracr extension is used, the crRNA may comprise a first flagpole extension. In general any first flagpole extension and first tracr extension may be employed, provided that they are complementary. In embodiments, the first flagpole extension and first tracr extension consist of 3, 4, 5, 6, 7, 8, 9, 10 or more complementary nucleotides.

[0391] The first flagpole extension may comprise nucleotides that are complementary, e.g., 80%, 85%, 90%, 95% or 99%, e.g., fully complementary, with nucleotides of the first tracr extension. In some aspects, the first flagpole extension nucleotides that hybridize with complementary nucleotides of the first tracr extension are contiguous. In some aspects, the first flagpole extension nucleotides that hybridize with complementary nucleotides of the first tracr extension are discontinuous, e.g., comprises two or more regions of hybridization separated by nucleotides that do not base pair with nucleotides of the first tracr extension. In some aspects, the first flagpole extension comprises at least 2, 3, 4, 5, 6, 7, 8, 9, 10, 11, 12, 13, 14, 15, 16, 17, 18, 19, 20 or more nucleotides. In some aspects, the first flagpole extension comprises, from 5′ to 3′: UGCUG. In some aspects, the first flagpole extension consists of SEQ ID NO: 6586. In some aspects the first flagpole extension comprises nucleic acid that is at least 80%, 85%, 90%, 95% or 99% homology to SEQ ID NO: 6586.

[0392] Some or all of the nucleotides of the first tracr extension can have a modification, e.g., modification found in Section XIII herein.

[0393] 3) The Loop

[0394] A loop serves to link the crRNA flagpole region (or optionally the first flagpole extension, when present) with the tracr (or optionally the first tracr extension, when present) of a sgRNA. The loop can link the crRNA flagpole region and tracr covalently or non-covalently. In an embodiment, the linkage is covalent. In an embodiment, the loop covalently couples the crRNA flagpole region and tracr. In an embodiment, the loop covalently couples the first flagpole extension and the first tracr extension. In an embodiment, the loop is, or comprises, a covalent bond interposed between the crRNA flagpole region and the domain of the tracr which hybridizes to the crRNA flagpole region. Typically, the loop comprises one or more, e.g., 2, 3, 4, 5, 6, 7, 8, 9, or 10 nucleotides.

[0395] In dgRNA molecules the two molecules can be associated by virtue of the hybridization between at least a portion of the crRNA (e.g., the crRNA flagpole region) and at least a portion of the tracr (e.g., the domain of the tracr which is complementary to the crRNA flagpole region).

[0396] A wide variety of loops are suitable for use in sgRNAs. Loops can consist of a covalent bond, or be as short as one or a few nucleotides, e.g., 1, 2, 3, 4, or 5 nucleotides in length. In an embodiment, a loop is 2, 3, 4, 5, 6, 7, 8, 9, 10, 15, 20, or 25 or more nucleotides in length. In an embodiment, a loop is 2 to 50, 2 to 40, 2 to 30, 2 to 20, 2 to 10, or 2 to 5 nucleotides in length. In an embodiment, a loop shares homology with, or is derived from, a naturally occurring sequence. In an embodiment, the loop has at least 50% homology with a loop disclosed herein. In an embodiment, the loop comprises SEQ ID NO: 6588.

[0397] Some or all of the nucleotides of the domain can have a modification, e.g., modification described in Section XIII herein.

[0398] 4) The Second Flagpole Extension

[0399] In an embodiment, a dgRNA can comprise additional sequence, 3′ to the crRNA flagpole region or, when present, the first flagpole extension, referred to herein as the second flagpole extension. In an embodiment, the second flagpole extension is, 2-10, 2-9, 2-8, 2-7, 2-6, 2-5, or 2-4 nucleotides in length. In an embodiment, the second flagpole extension is 2, 3, 4, 5, 6, 7, 8, 9, or 10 or more nucleotides in length. In an embodiment, the second flagpole extension comprises SEQ ID NO: 6587.

[0400] 5) The Tracr:

[0401] The tracr is the nucleic acid sequence required for nuclease, e.g., Cas9, binding. Without being bound by theory, it is believed that each Cas9 species is associated with a particular tracr sequence. Tracr sequences are utilized in both sgRNA and in dgRNA systems. In an embodiment, the tracr comprises sequence from, or derived from, an S. pyogenes tracr. In some aspects, the tracr has a portion that hybridizes to the flagpole portion of the crRNA, e.g., has sufficient complementarity to the crRNA flagpole region to form a duplexed region under at least some physiological conditions (sometimes referred to herein as the tracr flagpole region or a tracr domain complementary to the crRNA flagpole region). In embodiments, the domain of the tracr that hybridizes with the crRNA flagpole region comprises at least 5, 6, 7, 8, 9, 10, 11, 12, 13, 14, 15, 16, 17, 18, 19, or 20 nucleotides that hybridize with complementary nucleotides of the crRNA flagpole region. In some aspects, the tracr nucleotides that hybridize with complementary nucleotides of the crRNA flagpole region are contiguous. In some aspects, the tracr nucleotides that hybridize with complementary nucleotides of the crRNA flagpole region are discontinuous, e.g., comprises two or more regions of hybridization separated by nucleotides that do not base pair with nucleotides of the crRNA flagpole region. In some aspects, the portion of the tracr that hybridizes to the crRNA flagpole region comprises, from 5′ to 3′: UAGCAAGUUAAAA (SEQ ID NO: 6597). In some aspects, the portion of the tracr that hybridizes to the crRNA flagpole region comprises, from 5′ to 3′: UAGCAAGUUUAAA (SEQ ID NO: 6598). In embodiments, the sequence that hybridizes with the crRNA flagpole region is disposed on the tracr 5′- to the sequence of the tracr that additionally binds a nuclease, e.g., a Cas molecule, e.g., a Cas9 molecule.

[0402] The tracr further comprises a domain that additionally binds to a nuclease, e.g., a Cas molecule, e.g., a Cas9 molecule. Without being bound by theory, it is believed that Cas9 from different species bind to different tracr sequences. In some aspects, the tracr comprises sequence that binds to a S. pyogenes Cas9 molecule. In some aspects, the tracr comprises sequence that binds to a Cas9 molecule disclosed herein. In some aspects, the domain that additionally binds a Cas9 molecule comprises, from 5′ to 3′: UAAGGCUAGUCCGUUAUCAACUUGAAAAAGUGGCACCGAGUCGGUGC (SEQ ID NO: 6599). In some aspects the domain that additionally binds a Cas9 molecule comprises, from 5′ to 3′: UAAGGCUAGUCCGUUAUCAACUUGAAAAAGUGGCACCGAGUCGGUGCUUUU (SEQ ID NO: 6600).

[0403] In some embodiments, the tracr comprises SEQ ID NO: 6589. In some embodiments, the tracr comprises SEQ ID NO: 6590.

[0404] Some or all of the nucleotides of the tracr can have a modification, e.g., modification found in Section XIII herein. In embodiments, the gRNA (e.g., the sgRNA or the tracr and/or crRNA of a dgRNA), e.g., any of the gRNA or gRNA components described above, comprises an inverted abasic residue at the 5′ end, the 3′ end or both the 5′ and 3′ end of the gRNA. In embodiments, the gRNA (e.g., the sgRNA or the tracr and/or crRNA of a dgRNA), e.g., any of the gRNA or gRNA components described above, comprises one or more phosphorothioate bonds between residues at the 5′ end of the polynucleotide, for example, a phosphrothioate bond between the first two 5′ residues, between each of the first three 5′ residues, between each of the first four 5′ residues, or between each of the first five 5′ residues. In embodiments, the gRNA or gRNA component may alternatively or additionally comprise one or more phosphorothioate bonds between residues at the 3′ end of the polynucleotide, for example, a phosphrothioate bond between the first two 3′ residues, between each of the first three 3′ residues, between each of the first four 3′ residues, or between each of the first five 3′ residues. In an embodiment, the gRNA (e.g., the sgRNA or the tracr and/or crRNA of a dgRNA), e.g., any of the gRNA or gRNA components described above, comprises a phosphorothioate bond between each of the first four 5′ residues (e.g., comprises, e.g., consists of, three phosphorothioate bonds at the 5′ end(s)), and a phosphorothioate bond between each of the first four 3′ residues (e.g., comprises, e.g., consists of, three phosphorothioate bonds at the 3′ end(s)). In an embodiment, any of the phosphorothioate modifications described above are combined with an inverted abasic residue at the 5′ end, the 3′ end, or both the 5′ and 3′ ends of the polynucleotide. In such embodiments, the inverted abasic nucleotide may be linked to the 5′ and/or 3′ nucleotide by a phosphate bond or a phosphorothioate bond. In embodiments, the gRNA (e.g., the sgRNA or the tracr and/or crRNA of a dgRNA), e.g., any of the gRNA or gRNA components described above, comprises one or more nucleotides that include a 2′ O-methyl modification. In embodiments, each of the first 1, 2, 3, or more of the 5′ residues comprise a 2′ O-methyl modification. In embodiments, each of the first 1, 2, 3, or more of the 3′ residues comprise a 2′ O-methyl modification. In embodiments, the 4^{th}-to-terminal, 3^{rd}-to-terminal, and 2nd-to-terminal 3′ residues comprise a 2′ O-methyl modification. In embodiments, each of the first 1, 2, 3 or more of the 5′ residues comprise a 2′ O-methyl modification, and each of the first 1, 2, 3 or more of the 3′ residues comprise a 2′ O-methyl modification. In an embodiment, each of the first 3 of the 5′ residues comprise a 2′ O-methyl modification, and each of the first 3 of the 3′ residues comprise a 2′ O-methyl modification. In embodiments, each of the first 3 of the 5′ residues comprise a 2′ O-methyl modification, and the 4^{th}-to-terminal, 3^{rd}-to-terminal, and 2^{nd}-to-terminal 3′ residues comprise a 2′ O-methyl modification. In embodiments, any of the 2′ O-methyl modifications, e.g., as described above, may be combined with one or more phosphorothioate modifications, e.g., as described above, and/or one or more inverted abasic modifications, e.g., as described above. In an embodiment, the gRNA (e.g., the sgRNA or the tracr and/or crRNA of a dgRNA), e.g., any of the gRNA or gRNA components described above, comprises, e.g., consists of, a phosphorothioate bond between each of the first four 5′ residues (e.g., comprises, e.g., consists of three phosphorothioate bonds at the 5′ end of the polynucleotide(s)), a phosphorothioate bond between each of the first four 3′ residues (e.g., comprises, e.g., consists of three phosphorothioate bonds at the 5′ end of the polynucleotide(s)), a 2′ O-methyl modification at each of the first three 5′ residues, and a 2′ O-methyl modification at each of the first three 3′ residues. In an embodiment, the gRNA (e.g., the sgRNA or the tracr and/or crRNA of a dgRNA), e.g., any of the gRNA or gRNA components described above, comprises, e.g., consists of, a phosphorothioate bond between each of the first four 5′ residues (e.g., comprises, e.g., consists of three phosphorothioate bonds at the 5′ end of the polynucleotide(s)), a phosphorothioate bond between each of the first four 3′ residues (e.g., comprises, e.g., consists of three phosphorothioate bonds at the 5′ end of the polynucleotide(s)), a 2′ O-methyl modification at each of the first three 5′ residues, and a 2′ O-methyl modification at each of the 4^{th}-to-terminal, 3^{rd}-to-terminal, and 2^{nd}-to-terminal 3′ residues.

[0405] In an embodiment, the gRNA (e.g., the sgRNA or the tracr and/or crRNA of a dgRNA), e.g., any of the gRNA or gRNA components described above, comprises, e.g., consists of, a phosphorothioate bond between each of the first four 5′ residues (e.g., comprises, e.g., consists of three phosphorothioate bonds at the 5′ end of the polynucleotide(s)), a phosphorothioate bond between each of the first four 3′ residues (e.g., comprises, e.g., consists of three phosphorothioate bonds at the 5′ end of the polynucleotide(s)), a 2′ O-methyl modification at each of the first three 5′ residues, a 2′ O-methyl modification at each of the first three 3′ residues, and an additional inverted abasic residue at each of the 5′ and 3′ ends.

[0406] In an embodiment, the gRNA (e.g., the sgRNA or the tracr and/or crRNA of a dgRNA), e.g., any of the gRNA or gRNA components described above, comprises, e.g., consists of, a phosphorothioate bond between each of the first four 5′ residues (e.g., comprises, e.g., consists of three phosphorothioate bonds at the 5′ end of the polynucleotide(s)), a phosphorothioate bond between each of the first four 3′ residues (e.g., comprises, e.g., consists of three phosphorothioate bonds at the 5′ end of the polynucleotide(s)), a 2′ O-methyl modification at each of the first three 5′ residues, and a 2′ O-methyl modification at each of the 4^{th}-to-terminal, 3^{rd}-to-terminal, and 2^{nd}-to-terminal 3′ residues, and an additional inverted abasic residue at each of the 5′ and 3′ ends.

[0407] In an embodiment, the gRNA is a dgRNA and comprises, e.g., consists of:
[0408] crRNA:
[0409] mN*mN*mN*NNNNNNNNNNNNNNNNNGUUUUAGAGCUAU*mG*mC*mU (SEQ ID NO: 7833), where m indicates a base with 2′0-Methyl modification, * indicates a phosphorothioate bond, and N's indicate the residues of the targeting domain, e.g., as described herein, (optionally with an inverted abasic residue at the 5′ and/or 3′ terminus); and
[0410] tracr:
[0411] AACAGCAUAGCAAGUUAAAAUAAGGCUAGUCCGUUAUCAACUUGAAAAAGUGGCACCGA GUCGGUGCUUUUUUU (SEQ ID NO: 6660) (optionally with an inverted abasic residue at the 5′ and/or 3′ terminus).

[0412] In an embodiment, the gRNA is a dgRNA and comprises, e.g., consists of:
[0413] crRNA:
[0414] mN*mN*mN*NNNNNNNNNNNNNNNNNGUUUUAGAGCUAU*mG*mC*mU (SEQ ID NO: 7833), where m indicates a base with 2′O-Methyl modification, * indicates a phosphorothioate bond, and N's indicate the residues of the targeting domain, e.g., as described herein, (optionally with an inverted abasic residue at the 5′ and/or 3′ terminus); and tracr:
[0415] mA*mA*mC*AGCAUAGCAAGUUAAAAUAAGGCUAGUCCGUUAUCAACUUGAAAAAGUGGC ACCGAGUCGGUGCUUUU*mU*mU*mU (SEQ ID NO: 346), where m indicates a base with 2′O-Methyl modification, * indicates a phosphorothioate bond, and N's indicate the residues of the targeting domain, e.g., as described herein, (optionally with an inverted abasic residue at the 5′ and/or 3′ terminus).

[0416] In an embodiment, the gRNA is a dgRNA and comprises, e.g., consists of:
[0417] crRNA:
[0418] mN*mN*mN*NNNNNNNNNNNNNNNNNGUUUUAGAGCUAUGCUGUU*mU*mU*mG (SEQ ID NO: 7834), where m indicates a base with 2′O-Methyl modification, * indicates a phosphorothioate bond, and N's indicate the residues of the targeting domain, e.g., as described herein, (optionally with an inverted abasic residue at the 5′ and/or 3′ terminus); and
[0419] tracr:
[0420] AACAGCAUAGCAAGUUAAAAUAAGGCUAGUCCGUUAUCAACUUGAAAAAGUGGCACCGA GUCGGUGCUUUUUUU (SEQ ID NO: 6660) (optionally with an inverted abasic residue at the 5′ and/or 3′ terminus).

[0421] In an embodiment, the gRNA is a dgRNA and comprises, e.g., consists of:
[0422] crRNA:
[0423] mN*mN*mN*NNNNNNNNNNNNNNNNNGUUUUAGAGCUAUGCUGUU*mU*mU*mG (SEQ ID NO: 7834), where m indicates a base with 2′O-Methyl modification, * indicates a phosphorothioate bond, and N's indicate the residues of the targeting domain, e.g., as described herein, (optionally with an inverted abasic residue at the 5′ and/or 3′ terminus); and
[0424] tracr:
[0425] mA*mA*mC*AGCAUAGCAAGUUAAAAUAAGGCUAGUCCGUUAUCAACUUGAAAAAGUGGC ACCGAGUCGGUGCUUUU*mU*mU*mU (SEQ ID NO: 346), where m indicates a base with 2′O-Methyl modification, and * indicates a phosphorothioate bond (optionally with an inverted abasic residue at the 5′ and/or 3′ terminus).

[0426] In an embodiment, the gRNA is a dgRNA and comprises, e.g., consists of:
[0427] crRNA:
[0428] NNNNNNNNNNNNNNNNNNNNGUUUUAGAGCUAUGCUGUUUUG (SEQ ID NO: 2010), where N's indicate the residues of the targeting domain, e.g., as described herein, (optionally with an inverted abasic residue at the 5′ and/or 3′ terminus); and
[0429] tracr:
[0430] mA*mA*mC*AGCAUAGCAAGUUAAAAUAAGGCUAGUCCGUUAUCAACUUGAAAAAGUGGC ACCGAGUCGGUGCUUUU*mU*mU*mU (SEQ ID NO: 346), where m indicates a base with 2′O-Methyl modification, and * indicates a phosphorothioate bond (optionally with an inverted abasic residue at the 5′ and/or 3′ terminus).

[0431] In an embodiment, the gRNA is a sgRNA and comprises, e.g., consists of:
[0432] NNNNNNNNNNNNNNNNNNNNGUUUUAGAGCUAGAAAUAGCAAGUUAAAAUAAGGCUAGU CCGUUAUCAACUUGAAAAAGUGGCACCGAGUCGGUGCUUUU (SEQ ID NO: 2013), where m indicates a base with 2′O-Methyl modification, * indicates a phosphorothioate bond, and N's indicate the residues of the targeting domain, e.g., as described herein, (optionally with an inverted abasic residue at the 5′ and/or 3′ terminus).

[0433] In an embodiment, the gRNA is a sgRNA and comprises, e.g., consists of:
[0434] mN*mN*mN*NNNNNNNNNNNNNNNNNGUUUUAGAGCUAGAAAUAGCAAGUUAAAAUAAG GCUAGUCCGUUAUCAACUUGAAAAAGUGGCACCGAGUCGGUGCU*mU*mU*mU (SEQ ID NO: 7835), where m indicates a base with 2′O-Methyl modification, * indicates a phosphorothioate bond, and N's indicate the residues of the targeting domain, e.g., as described herein, (optionally with an inverted abasic residue at the 5′ and/or 3′ terminus).

[0435] In an embodiment, the gRNA is a sgRNA and comprises, e.g., consists of:
[0436] mN*mN*mN*NNNNNNNNNNNNNNNNNGUUUUAGAGCUAGAAAUAGCAAGUUAAAAUAAG GCUAGUCCGUUAUCAACUUGAAAAAGUGGCACCGAGUCGGUGCmU*mU*mU*U (SEQ ID NO: 7836), where m indicates a base with 2′O-Methyl modification, * indicates a phosphorothioate bond, and N's indicate the residues of the targeting domain, e.g., as described herein, (optionally with an inverted abasic residue at the 5′ and/or 3′ terminus).

[0437] 6) First Tracr Extension

[0438] Where the gRNA comprises a first flagpole extension, the tracr may comprise a first tracr extension. The first tracr extension may comprise nucleotides that are complementary, e.g., 80%, 85%, 90%, 95% or 99%, e.g., fully complementary, with nucleotides of the first flagpole extension. In some aspects, the first tracr extension nucleotides that hybridize with complementary nucleotides of the first flagpole extension are contiguous. In some aspects, the first tracr extension nucleotides that hybridize with complementary nucleotides of the first flagpole extension are discontinuous, e.g., comprises two or more regions of hybridization separated by nucleotides that do not base pair with nucleotides of the first flagpole extension. In some aspects, the first tracr extension comprises at least 2, 3, 4, 5, 6, 7, 8, 9, 10, 11, 12, 13, 14, 15, 16, 17, 18, 19, 20 or more nucleotides. In some aspects, the first tracr extension comprises SEQ ID NO: 6591. In some aspects the first tracr extension comprises nucleic acid that is at least 80%, 85%, 90%, 95% or 99% homology to SEQ ID NO: 6591.

[0439] Some or all of the nucleotides of the first tracr extension can have a modification, e.g., modification found in Section XIII herein.

[0440] In some embodiments, the sgRNA may comprise, from 5′ to 3′, disposed 3′ to the targeting domain:

a)
(SEQ ID NO: 6601)
GUUUUAGAGCUAGAAAUAGCAAGUUAAAAUAAGGCUAGUCCGUUAUCAAC
UUGAAAAAGUGGCACCGAGUCGGUGC;
b)
(SEQ ID NO: 6602)
GUUUAAGAGCUAGAAAUAGCAAGUUUAAAUAAGGCUAGUCCGUUAUCAAC
UUGAAAAAGUGGCACCGAGUCGGUGC;
c)
(SEQ ID NO: 6603)
GUUUUAGAGCUAUGCUGGAAACAGCAUAGCAAGUUAAAAUAAGGCUAGUC
CGUUAUCAACUUGAAAAAGUGGCACCGAGUCGGUGC;
d)
(SEQ ID NO: 6604)
GUUUAAGAGCUAUGCUGGAAACAGCAUAGCAAGUUUAAAUAAGGCUAGUC
CGUUAUCAACUUGAAAAAGUGGCACCGAGUCGGUGC;

[0441] e) any of a) to d), above, further comprising, at the 3′ end, at least 1, 2, 3, 4, 5, 6 or 7 uracil (U) nucleotides, e.g., 1, 2, 3, 4, 5, 6, or 7 uracil (U) nucleotides;
[0442] f) any of a) to d), above, further comprising, at the 3′ end, at least 1, 2, 3, 4, 5, 6 or 7 adenine (A) nucleotides, e.g., 1, 2, 3, 4, 5, 6, or 7 adenine (A) nucleotides; or
[0443] g) any of a) to f), above, further comprising, at the 5′ end (e.g., at the 5′ terminus, e.g., 5′ to the targeting domain), at least 1, 2, 3, 4, 5, 6 or 7 adenine (A) nucleotides, e.g., 1, 2, 3, 4, 5, 6, or 7 adenine (A) nucleotides. In embodiments, any of a) to g) above is disposed directly 3′ to the targeting domain.

[0444] In an embodiment, a sgRNA of the invention comprises, e.g., consists of, from 5′ to 3′: [targeting domain]—

(SEQ ID NO: 7811)
GUUUUAGAGCUAGAAAUAGCAAGUUAAAAUAAGGCUAGUCCGUUAUCAAC
UUGAAAAAGUGGCACCGAGUCGGUGCUUUU.

[0445] In an embodiment, a sgRNA of the invention comprises, e.g., consists of, from 5′ to 3′: [targeting domain]—

(SEQ ID NO: 7807)
GUUUAAGAGCUAUGCUGGAAACAGCAUAGCAAGUUUAAAUAAGGCUAGUC
CGUUAUCAACUUGAAAAAGUGGCACCGAGUCGGUGCUUUU.

[0446] In some embodiments, the dgRNA may comprise:

[0447] A crRNA comprising, from 5′ to 3′, preferrably disposed directly 3′ to the targeting domain:

a) GUUUUAGAGCUA (SEQ ID NO: 6584);
b) GUUUAAGAGCUA (SEQ ID NO: 6585);
c) GUUUUAGAGCUAUGCUG (SEQ ID NO: 6605);
d) GUUUAAGAGCUAUGCUG (SEQ ID NO: 6606);
e) GUUUUAGAGCUAUGCUGUUUUG (SEQ ID NO: 6607);
f) GUUUAAGAGCUAUGCUGUUUUG (SEQ ID NO: 6608);
or
g) GUUUUAGAGCUAUGCU (SEQ ID NO: 7806):

and a tracr comprising, from 5′ to 3′:

a)
(SEQ ID NO: 6589)
UAGCAAGUUAAAAUAAGGCUAGUCCGUUAUCAACUUGAAAAAGUGGCACC
GAGUCGGUGC;
b)
(SEQ ID NO: 6590)
UAGCAAGUUUAAAUAAGGCUAGUCCGUUAUCAACUUGAAAAAGUGGCACC
GAGUCGGUGC;
c)
(SEQ ID NO: 6609)
CAGCAUAGCAAGUUAAAAUAAGGCUAGUCCGUUAUCAACUUGAAAAAGUG
GCACCGAGUCGGUGC;
d)
(SEQ ID NO: 6610)
CAGCAUAGCAAGUUUAAAUAAGGCUAGUCCGUUAUCAACUUGAAAAAGUG
GCACCGAGUCGGUGC;
e)
(SEQ ID NO: 6660)
AACAGCAUAGCAAGUUAAAAUAAGGCUAGUCCGUUAUCAACUUGAAAAAG
UGGCACCGAGUCGGUGCUUUUUUU;
f)
(SEQ ID NO: 6661)
AACAGCAUAGCAAGUUUAAAUAAGGCUAGUCCGUUAUCAACUUGAAAAAG
UGGCACCGAGUCGGUGCUUUUUUU;
g)
(SEQ ID NO: 7812)
AACAGCAUAGCAAGUUAAAAUAAGGCUAGUCCGUUAUCAACUUGAAAAAG
UGGCACCGAGUCGGUGC
h)
(SEQ ID NO: 7807)
GUUUAAGAGCUAUGCUGGAAACAGCAUAGCAAGUUUAAAUAAGGCUAGUC
CGUUAUCAACUUGAAAAAGUGGCACCGAGUCGGUGCUUUU;
i)
(SEQ ID NO: 7808)
AGCAUAGCAAGUUAAAAUAAGGCUAGUCCGUUAUCAACUUGAAAAAGUGG
CACCGAGUCGGUGCUUU;
j)
(SEQ ID NO: 7809)
GUUGGAACCAUUCAAAACAGCAUAGCAAGUUAAAAUAAGGCUAGUCCGUU
AUCAACUUGAAAAAGUGGCACCGAGUCGGUGCUUU;

[0448] k) any of a) to j), above, further comprising, at the 3′ end, at least 1, 2, 3, 4, 5, 6 or 7 uracil (U) nucleotides, e.g., 1, 2, 3, 4, 5, 6, or 7 uracil (U) nucleotides;
[0449] l) any of a) to j), above, further comprising, at the 3′ end, at least 1, 2, 3, 4, 5, 6 or 7 adenine (A) nucleotides, e.g., 1, 2, 3, 4, 5, 6, or 7 adenine (A) nucleotides; or
[0450] m) any of a) to l), above, further comprising, at the 5′ end (e.g., at the 5′ terminus), at least 1, 2, 3, 4, 5, 6 or 7 adenine (A) nucleotides, e.g., 1, 2, 3, 4, 5, 6, or 7 adenine (A) nucleotides.

[0451] In an embodiment, the sequence of k), above comprises the 3′ sequence UUUUUU, e.g., if a U6 promoter is used for transcription. In an embodiment, the sequence of k), above, comprises the 3′ sequence UUUU, e.g., if an HI promoter is used for transcription. In an embodiment, sequence of k), above, comprises variable numbers of 3′ U's depending, e.g., on the termination signal of the pol-III promoter used. In an embodiment, the sequence of k), above, comprises variable 3′ sequence derived from the DNA template if a T7 promoter is used. In an embodiment, the sequence of k), above, comprises variable 3′ sequence derived from the DNA template, e.g., if in vitro transcription is used to generate the RNA molecule. In an embodiment, the sequence of k), above, comprises variable 3′ sequence derived from the DNA template, e.g, if a pol-II promoter is used to drive transcription.

[0452] In an embodiment, the crRNA comprises, e.g., consists of, a targeting domain and, disposed 3′ to the targeting domain (e.g., disposed directly 3′ to the targeting domain), a sequence comprising, e.g., consisting of, SEQ ID NO: 6607, and the tracr comprises, e.g., consists of AACAGCAUAGCAAGUUAAAAUAAGGCUAGUCCGUUAUCAACUUGAAAAAGUGGCACCGA GUCGGUGCUUUUUUU (SEQ ID NO: 6660).

[0453] In an embodiment, the crRNA comprises, e.g., consists of, a targeting domain and, disposed 3′ to the targeting domain (e.g., disposed directly 3′ to the targeting domain), a sequence comprising, e.g., consisting of, SEQ ID NO: 6608, and the tracr comprises, e.g., consists of, AACAGCAUAGCAAGUUUAAAUAAGGCUAGUCCGUUAUCAACUUGAAAAAGUGGCACCGA GUCGGUGCUUUUUUU (SEQ ID NO: 6661).

[0454] In an embodiment, the crRNA comprises, e.g., consists of, a targeting domain and, disposed 3′ to the targeting domain (e.g., disposed directly 3′ to the targeting domain), a sequence comprising, e.g., consisting of, GUUUUAGAGCUAUGCU (SEQ ID NO: 7806), and the tracr comprises, e.g., consists of, GUUUAAGAGCUAUGCUGGAAACAGCAUAGCAAGUUUAAAUAAGGCUAGUCCGUUAUCAA CUUGAAAAAGUGGCACCGAGUCGGUGCUUUU (SEQ ID NO: 7807).

[0455] In an embodiment, the crRNA comprises, e.g., consists of, a targeting domain and, disposed 3′ to the targeting domain (e.g., disposed directly 3′ to the targeting domain), a sequence comprising, e.g., consisting of, GUUUUAGAGCUAUGCU (SEQ ID NO: 7806), and the tracr comprises, e.g., consists of, AGCAUAGCAAGUUAAAAUAAGGCUAGUCCGUUAUCAACUUGAAAAAGUGGCACCGAGUC GGUGCUUU (SEQ ID NO: 7808).

[0456] In an embodiment, the crRNA comprises, e.g., consists of, a targeting domain and, disposed 3′ to the targeting domain (e.g., disposed directly 3′ to the targeting domain), a sequence comprising, e.g., consisting of, GUUUUAGAGCUAUGCUGUUUUG (SEQ ID NO: 6607), and the tracr comprises, e.g., consists of, GUUGGAACCAUUCAAAACAGCAUAGCAAGUUAAAAUAAGGCUAGUCCGUUAUCAACUUG AAAAAGUGGCACCGAGUCGGUGCUUU (SEQ ID NO: 7809).

[0457] II. Targeting Domains Useful for Altering Expression of Globin Genes

[0458] Provided in the tables below are targeting domains for gRNA molecules for use in the various aspect of the present invention, for example, in altering expression of globin genes, for example, a fetal hemoglobin gene or a hemoglobin beta gene.

TABLE 1
gRNA targeting domains directed to BLC11a exon regions

| | | | | | | SEQ |
|---|---|---|---|---|---|---|
| | | Target | | Targeting Site | | ID |
| Id. | Target | Region | Strand | (hg38) | gRNA Targeting Domain | NO: |
| 53335_5_1 | BCL11a | Exon 5 | + | chr2: 60451170-60451195 | CAGUCAUUAUUUAUUAUGA | 400 |
| | | | | | AUAAGC | |
| 53335_5_2 | BCL11a | Exon 5 | + | chr2: 60451196-60451221 | GGAAAUAAUUCACAUGCCA | 401 |
| | | | | | AUUAUU | |
| 53335_5_3 | BCL11a | Exon 5 | + | chr2: 60451217-60451242 | UAUUUGGCUAUCUUUUCAC | 402 |
| | | | | | UAAGCU | |
| 53335_5_4 | BCL11a | Exon 5 | + | chr2: 60451233-60451258 | CACUAAGCUAGGUAAUCUA | 403 |
| | | | | | GCCAGA | |
| 53335_5_5 | BCL11a | Exon 5 | + | chr2: 60451236-60451261 | UAAGCUAGGUAAUCUAGCC | 404 |
| | | | | | AGAAGG | |
| 53335_5_6 | BCL11a | Exon 5 | + | chr2: 60451241-60451266 | UAGGUAAUCUAGCCAGAAG | 405 |
| | | | | | GUGGAU | |
| 53335_5_7 | BCL11a | Exon 5 | + | chr2: 60451245-60451270 | UAAUCUAGCCAGAAGGUGG | 406 |
| | | | | | AUAGGU | |
| 53335_5_8 | BCL11a | Exon 5 | + | chr2: 60451261-60451286 | UGGAUAGGUAGGAUUUUCC | 407 |
| | | | | | CCACUU | |
| 53335_5_9 | BCL11a | Exon 5 | + | chr2: 60451268-60451293 | GUAGGAUUUUCCCCACUUA | 408 |
| | | | | | GGUUCA | |
| 53335_5_10 | BCL11a | Exon 5 | + | chr2: 60451295-60451320 | GCCUGUAUGUGAAUCUACA | 409 |
| | | | | | GCACAC | |
| 53335_5_11 | BCL11a | Exon 5 | + | chr2: 60451359-60451384 | UGCUAUGUUGUUUCUAAUU | 410 |
| | | | | | CUCUUC | |
| 53335_5_12 | BCL11a | Exon 5 | + | chr2: 60451414-60451439 | UGAGAAAAGUUCUGUGCAA | 411 |
| | | | | | AUUAAC | |
| 53335_5_13 | BCL11a | Exon 5 | + | chr2: 60451415-60451440 | GAGAAAAGUUCUGUGCAAA | 412 |
| | | | | | UUAACU | |
| 53335_5_14 | BCL11a | Exon 5 | + | chr2: 60451462-60451487 | CCUGUUUGUAGAUGUAACU | 413 |
| | | | | | UAUUUG | |
| 53335_5_15 | BCL11a | Exon 5 | + | chr2: 60451477-60451502 | AACUUAUUUGUGGCACUAA | 414 |
| | | | | | UUUCUA | |
| 53335_5_16 | BCL11a | Exon 5 | + | chr2: 60451625-60451650 | GUCUGCAUUAAGAUAUAUU | 415 |
| | | | | | UCCUGA | |
| 53335_5_17 | BCL11a | Exon 5 | + | chr2: 60451630-60451655 | CAUUAAGAUAUAUUUCCUG | 416 |
| | | | | | AAGGUU | |
| 53335_5_18 | BCL11a | Exon 5 | + | chr2: 60451631-60451656 | AUUAAGAUAUAUUUCCUGA | 417 |
| | | | | | AGGUUU | |
| 53335_5_19 | BCL11a | Exon 5 | + | chr2: 60451687-60451712 | ACUACUGACAUUUAUCACC | 418 |
| | | | | | UUCUUU | |
| 53335_5_20 | BCL11a | Exon 5 | + | chr2: 60451754-60451779 | UUAAAAGACAAAUUCAAAU | 419 |
| | | | | | CCUGCA | |
| 53335_5_21 | BCL11a | Exon 5 | + | chr2: 60451786-60451811 | CACCAAAAGCAUAUAUUUG | 420 |
| | | | | | AAAAAC | |
| 53335_5_22 | BCL11a | Exon 5 | + | chr2: 60451792-60451817 | AAGCAUAUAUUUGAAAAAC | 421 |
| | | | | | AGGAUU | |
| 53335_5_23 | BCL11a | Exon 5 | + | chr2: 60451819-60451844 | GCGUGCCAUAUUAUGCAUU | 422 |
| | | | | | AUUUAA | |
| 53335_5_24 | BCL11a | Exon 5 | + | chr2: 60451847-60451872 | UAUGCAAAUUAUAAGUCAG | 423 |
| | | | | | ACAGUU | |
| 53335_5_25 | BCL11a | Exon 5 | + | chr2: 60451971-60451996 | UUGAAAAUUUAUGCCAUCU | 424 |
| | | | | | GAUAAG | |
| 53335_5_26 | BCL11a | Exon 5 | + | chr2: 60452037-60452062 | AAAUCUGUUCCUCCUACCC | 425 |
| | | | | | ACCCGA | |
| 53335_5_27 | BCL11a | Exon 5 | + | chr2: 60452038-60452063 | AAUCUGUUCCUCCUACCCA | 426 |
| | | | | | CCCGAU | |
| 53335_5_28 | BCL11a | Exon 5 | + | chr2: 60452048-60452073 | UCCUACCCACCCGAUGGGU | 427 |
| | | | | | GUCUGU | |
| 53335_5_29 | BCL11a | Exon 5 | + | chr2: 60452055-60452080 | CACCCGAUGGGUGUCUGUA | 428 |
| | | | | | GGAAAC | |
| 53335_5_30 | BCL11a | Exon 5 | + | chr2: 60452203-60452228 | AGACAACAUAGAAUGUAUA | 429 |
| | | | | | GAAACA | |
| 53335_5_31 | BCL11a | Exon 5 | + | chr2: 60452204-60452229 | GACAACAUAGAAUGUAUAG | 430 |
| | | | | | AAACAA | |
| 53335_5_32 | BCL11a | Exon 5 | + | chr2: 60452205-60452230 | ACAACAUAGAAUGUAUAGA | 431 |
| | | | | | AACAAG | |
| 53335_5_33 | BCL11a | Exon 5 | + | chr2: 60452209-60452234 | CAUAGAAUGUAUAGAAACA | 432 |
| | | | | | AGGGGU | |
| 53335_5_34 | BCL11a | Exon 5 | + | chr2: 60452210-60452235 | AUAGAAUGUAUAGAAACAA | 433 |
| | | | | | GGGGUU | |
| 53335_5_35 | BCL11a | Exon 5 | + | chr2: 60452211-60452236 | UAGAAUGUAUAGAAACAAG | 434 |
| | | | | | GGGUUG | |
| 53335_5_36 | BCL11a | Exon 5 | + | chr2: 60452237-60452262 | GGACUCAUGCGCAUUUCCA | 435 |
| | | | | | CAAUAC | |
| 53335_5_37 | BCL11a | Exon 5 | + | chr2: 60452245-60452270 | GCGCAUUUCCACAAUACAG | 436 |
| | | | | | GUAAUU | |
| 53335_5_38 | BCL11a | Exon 5 | + | chr2: 60452249-60452274 | AUUUCCACAAUACAGGUAA | 437 |
| | | | | | UUAGGU | |
| 53335_5_39 | BCL11a | Exon 5 | + | chr2: 60452253-60452278 | CCACAAUACAGGUAAUUAG | 438 |
| | | | | | GUUGGC | |
| 53335_5_40 | BCL11a | Exon 5 | + | chr2: 60452263-60452288 | GGUAAUUAGGUUGGCUGGU | 439 |
| | | | | | UUCAGA | |
| 53335_5_41 | BCL11a | Exon 5 | + | chr2: 60452264-60452289 | GUAAUUAGGUUGGCUGGUU | 440 |
| | | | | | UCAGAA | |
| 53335_5_42 | BCL11a | Exon 5 | + | chr2: 60452269-60452294 | UAGGUUGGCUGGUUUCAGA | 441 |
| | | | | | AGGGCC | |
| 53335_5_43 | BCL11a | Exon 5 | + | chr2: 60452270-60452295 | AGGUUGGCUGGUUUCAGAA | 442 |
| | | | | | GGGCCA | |
| 53335_5_44 | BCL11a | Exon 5 | + | chr2: 60452291-60452316 | GCCAGGGCAUCACUCAUGA | 443 |
| | | | | | CAGCGA | |
| 53335_5_45 | BCL11a | Exon 5 | + | chr2: 60452298-60452323 | CAUCACUCAUGACAGCGAU | 444 |
| | | | | | GGUCCA | |
| 53335_5_46 | BCL11a | Exon 5 | + | chr2: 60452299-60452324 | AUCACUCAUGACAGCGAUG | 445 |
| | | | | | GUCCAC | |
| 53335_5_47 | BCL11a | Exon 5 | + | chr2: 60452311-60452336 | AGCGAUGGUCCACGGGCCC | 446 |
| | | | | | UCUCUA | |
| 53335_5_48 | BCL11a | Exon 5 | + | chr2: 60452312-60452337 | GCGAUGGUCCACGGGCCCU | 447 |
| | | | | | CUCUAU | |
| 53335_5_49 | BCL11a | Exon 5 | + | chr2: 60452335-60452360 | AUGGGACUGAUUCACUGUU | 448 |
| | | | | | CCAAUG | |
| 53335_5_50 | BCL11a | Exon 5 | + | chr2: 60452336-60452361 | UGGGACUGAUUCACUGUUC | 449 |
| | | | | | CAAUGU | |
| 53335_5_51 | BCL11a | Exon 5 | + | chr2: 60452383-60452408 | UUUUUAUUAAAAAAUAUAA | 450 |
| | | | | | AUAAAA | |
| 53335_5_52 | BCL11a | Exon 5 | + | chr2: 60452392-60452417 | AAAAAUAUAAAUAAAAUGG | 451 |
| | | | | | CGCUGC | |
| 53335_5_53 | BCL11a | Exon 5 | + | chr2: 60452398-60452423 | AUAAAUAAAAUGGCGCUGC | 452 |
| | | | | | AGGCCU | |
| 53335_5_54 | BCL11a | Exon 5 | + | chr2: 60452402-60452427 | AUAAAAUGGCGCUGCAGGC | 453 |
| | | | | | CUAGGC | |
| 53335_5_55 | BCL11a | Exon 5 | + | chr2: 60452406-60452431 | AAUGGCGCUGCAGGCCUAG | 454 |
| | | | | | GCUGGA | |
| 53335_5_56 | BCL11a | Exon 5 | + | chr2: 60452416-60452441 | CAGGCCUAGGCUGGAAGGA | 455 |
| | | | | | CUCUGC | |
| 53335_5_57 | BCL11a | Exon 5 | + | chr2: 60452436-60452461 | UCUGCAGGACUCUGUCUUC | 456 |
| | | | | | GCACAA | |
| 53335_5_58 | BCL11a | Exon 5 | + | chr2: 60452444-60452469 | ACUCUGUCUUCGCACAACG | 457 |
| | | | | | GCUUCU | |
| 53335_5_59 | BCL11a | Exon 5 | + | chr2: 60452447-60452472 | CUGUCUUCGCACAACGGCU | 458 |
| | | | | | UCUUGG | |
| 53335_5_60 | BCL11a | Exon 5 | + | chr2: 60452478-60452503 | CUGUCAGAAAACAUCACAA | 459 |
| | | | | | ACUAGC | |
| 53335_5_61 | BCL11a | Exon 5 | + | chr2: 60452505-60452530 | GAUGACAGACCACGCUGAC | 460 |
| | | | | | GUCGAC | |
| 53335_5_62 | BCL11a | Exon 5 | + | chr2: 60452506-60452531 | AUGACAGACCACGCUGACG | 461 |
| | | | | | UCGACU | |
| 53335_5_63 | BCL11a | Exon 5 | + | chr2: 60452509-60452534 | ACAGACCACGCUGACGUCG | 462 |
| | | | | | ACUGGG | |
| 53335_5_64 | BCL11a | Exon 5 | + | chr2: 60452531-60452556 | GGGCGGCACGCGUCCACCC | 463 |
| | | | | | CACCCC | |
| 53335_5_65 | BCL11a | Exon 5 | + | chr2: 60452532-60452557 | GGCGGCACGCGUCCACCCC | 464 |
| | | | | | ACCCCU | |
| 53335_5_66 | BCL11a | Exon 5 | + | chr2: 60452533-60452558 | GCGGCACGCGUCCACCCCA | 465 |
| | | | | | CCCCUG | |
| 53335_5_67 | BCL11a | Exon 5 | + | chr2: 60452534-60452559 | CGGCACGCGUCCACCCCACC | 466 |
| | | | | | CCUGG | |
| 53335_5_68 | BCL11a | Exon 5 | + | chr2: 60452559-60452584 | GGGCUUCAAAUUUUCUCAG | 467 |
| | | | | | AACUUA | |
| 53335_5_69 | BCL11a | Exon 5 | + | chr2: 60452560-60452585 | GGCUUCAAAUUUUCUCAGA | 468 |
| | | | | | ACUUAA | |
| 53335_5_70 | BCL11a | Exon 5 | + | chr2: 60452607-60452632 | AAACUGCCACACAUCUUGA | 469 |
| | | | | | GCUCUC | |
| 53335_5_71 | BCL11a | Exon 5 | + | chr2: 60452608-60452633 | AACUGCCACACAUCUUGAG | 470 |
| | | | | | CUCUCU | |
| 53335_5_72 | BCL11a | Exon 5 | + | chr2: 60452623-60452648 | UGAGCUCUCUGGGUACUAC | 471 |
| | | | | | GCCGAA | |
| 53335_5_73 | BCL11a | Exon 5 | + | chr2: 60452624-60452649 | GAGCUCUCUGGGUACUACG | 472 |
| | | | | | CCGAAU | |
| 53335_5_74 | BCL11a | Exon 5 | + | chr2: 60452625-60452650 | AGCUCUCUGGGUACUACGC | 473 |
| | | | | | CGAAUG | |
| 53335_5_75 | BCL11a | Exon 5 | + | chr2: 60452626-60452651 | GCUCUCUGGGUACUACGCC | 474 |
| | | | | | GAAUGG | |
| 53335_5_76 | BCL11a | Exon 5 | + | chr2: 60452649-60452674 | GGGGGUGUGUGAAGAACCU | 475 |
| | | | | | AGAAAG | |
| 53335_5_77 | BCL11a | Exon 5 | + | chr2: 60452653-60452678 | GUGUGUGAAGAACCUAGAA | 476 |
| | | | | | AGAGGU | |
| 53335_5_78 | BCL11a | Exon 5 | + | chr2: 60452662-60452687 | GAACCUAGAAAGAGGUUGG | 477 |
| | | | | | AGACAG | |
| 53335_5_79 | BCL11a | Exon 5 | − | chr2: 60451215-60451240 | CUUAGUGAAAAGAUAGCCA | 478 |
| | | | | | AAUAAU | |
| 53335_5_80 | BCL11a | Exon 5 | − | chr2: 60451256-60451281 | GGGAAAAUCCUACCUAUCC | 479 |
| | | | | | ACCUUC | |
| 53335_5_81 | BCL11a | Exon 5 | − | chr2: 60451281-60451306 | CACAUACAGGCCGUGAACC | 480 |
| | | | | | UAAGUG | |
| 53335_5_82 | BCL11a | Exon 5 | − | chr2: 60451282-60451307 | UCACAUACAGGCCGUGAAC | 481 |
| | | | | | CUAAGU | |
| 53335_5_83 | BCL11a | Exon 5 | − | chr2: 60451283-60451308 | UUCACAUACAGGCCGUGAA | 482 |
| | | | | | CCUAAG | |
| 53335_5_84 | BCL11a | Exon 5 | − | chr2: 60451299-60451324 | ACCUGUGUGCUGUAGAUUC | 483 |
| | | | | | ACAUAC | |
| 53335_5_85 | BCL11a | Exon 5 | − | chr2: 60451350-60451375 | UAGAAACAACAUAGCAAAU | 484 |
| | | | | | UAAAAU | |
| 53335_5_86 | BCL11a | Exon 5 | − | chr2: 60451394-60451419 | UCUCAGUUUGGUAUUUUUU | 485 |
| | | | | | ACUGCU | |
| 53335_5_87 | BCL11a | Exon 5 | − | chr2: 60451411-60451436 | AAUUUGCACAGAACUUUUC | 486 |
| | | | | | UCAGUU | |
| 53335_5_88 | BCL11a | Exon 5 | − | chr2: 60451446-60451471 | ACAAACAGGUGGUAAAAAU | 487 |
| | | | | | UCUUUC | |
| 53335_5_89 | BCL11a | Exon 5 | − | chr2: 60451462-60451487 | CAAAUAAGUUACAUCUACA | 488 |
| | | | | | AACAGG | |
| 53335_5_90 | BCL11a | Exon 5 | − | chr2: 60451465-60451490 | CCACAAAUAAGUUACAUCU | 489 |
| | | | | | ACAAAC | |
| 53335_5_91 | BCL11a | Exon 5 | − | chr2: 60451552-60451577 | GAUUUUAGAGGGGGGAAAU | 490 |
| | | | | | UAUAGG | |
| 53335_5_92 | BCL11a | Exon 5 | − | chr2: 60451555-60451580 | GCAGAUUUUAGAGGGGGGA | 491 |
| | | | | | AAUUAU | |
| 53335_5_93 | BCL11a | Exon 5 | − | chr2: 60451565-60451590 | GAAAUUUGGGGCAGAUUUU | 492 |
| | | | | | AGAGGG | |
| 53335_5_94 | BCL11a | Exon 5 | − | chr2: 60451566-60451591 | GGAAAUUUGGGGCAGAUUU | 493 |
| | | | | | UAGAGG | |
| 53335_5_95 | BCL11a | Exon 5 | − | chr2: 60451567-60451592 | AGGAAAUUUGGGGCAGAUU | 494 |
| | | | | | UUAGAG | |
| 53335_5_96 | BCL11a | Exon 5 | − | chr2: 60451568-60451593 | CAGGAAAUUUGGGGCAGAU | 495 |
| | | | | | UUUAGA | |
| 53335_5_97 | BCL11a | Exon 5 | − | chr2: 60451569-60451594 | UCAGGAAAUUUGGGGCAGA | 496 |
| | | | | | UUUUAG | |
| 53335_5_98 | BCL11a | Exon 5 | − | chr2: 60451582-60451607 | UUUAGUACUUACAUCAGGA | 497 |
| | | | | | AAUUUG | |
| 53335_5_99 | BCL11a | Exon 5 | − | chr2: 60451583-60451608 | CUUUAGUACUUACAUCAGG | 498 |
| | | | | | AAAUUU | |
| 53335_5_100 | BCL11a | Exon 5 | − | chr2: 60451584-60451609 | UCUUUAGUACUUACAUCAG | 499 |
| | | | | | GAAAUU | |
| 53335_5_101 | BCL11a | Exon 5 | − | chr2: 60451592-60451617 | AUAAAACUUCUUUAGUACU | 500 |
| | | | | | UACAUC | |
| 53335_5_102 | BCL11a | Exon 5 | − | chr2: 60451648-60451673 | UCUAAUUUUAGGUUCCCAA | 501 |
| | | | | | ACCUUC | |
| 53335_5_103 | BCL11a | Exon 5 | − | chr2: 60451664-60451689 | GUUUCUUAUUAAAUAUUCU | 502 |
| | | | | | AAUUUU | |
| 53335_5_104 | BCL11a | Exon 5 | − | chr2: 60451707-60451732 | CUGGGCGAGCGGUAAAUCC | 503 |
| | | | | | UAAAGA | |
| 53335_5_105 | BCL11a | Exon 5 | − | chr2: 60451723-60451748 | UUAGGAAAGAACAUCACUG | 504 |
| | | | | | GGCGAG | |
| 53335_5_106 | BCL11a | Exon 5 | − | chr2: 60451730-60451755 | AUUUAGCUUAGGAAAGAAC | 505 |
| | | | | | AUCACU | |
| 53335_5_107 | BCL11a | Exon 5 | − | chr2: 60451731-60451756 | AAUUUAGCUUAGGAAAGAA | 506 |
| | | | | | CAUCAC | |
| 53335_5_108 | BCL11a | Exon 5 | − | chr2: 60451746-60451771 | UUGAAUUUGUCUUUUAAUU | 507 |
| | | | | | UAGCUU | |
| 53335_5_109 | BCL11a | Exon 5 | − | chr2: 60451776-60451801 | UAUAUGCUUUUGGUGGCUA | 508 |
| | | | | | CCAUGC | |
| 53335_5_110 | BCL11a | Exon 5 | − | chr2: 60451788-60451813 | CUGUUUUUCAAAUAUAUGC | 509 |
| | | | | | UUUUGG | |
| 53335_5_111 | BCL11a | Exon 5 | − | chr2: 60451791-60451816 | AUCCUGUUUUUCAAAUAUA | 510 |
| | | | | | UGCUUU | |
| 53335_5_112 | BCL11a | Exon 5 | − | chr2: 60451827-60451852 | GCAUACCAUUAAAUAAUGC | 511 |
| | | | | | AUAAUA | |
| 53335_5_113 | BCL11a | Exon 5 | − | chr2: 60451882-60451907 | AUUGCUGUUUAUUAAUGCU | 512 |
| | | | | | GAAGUG | |
| 53335_5_114 | BCL11a | Exon 5 | − | chr2: 60451949-60451974 | CAAGGAGAAUCAAAAUGCA | 513 |
| | | | | | AAACUU | |
| 53335_5_115 | BCL11a | Exon 5 | − | chr2: 60451950-60451975 | UCAAGGAGAAUCAAAAUGC | 514 |
| | | | | | AAAACU | |
| 53335_5_116 | BCL11a | Exon 5 | − | chr2: 60451972-60451997 | GCUUAUCAGAUGGCAUAAA | 515 |
| | | | | | UUUUCA | |
| 53335_5_117 | BCL11a | Exon 5 | − | chr2: 60451987-60452012 | GGGAACUAGGUUACCGCUU | 516 |
| | | | | | AUCAGA | |
| 53335_5_118 | BCL11a | Exon 5 | − | chr2: 60452005-60452030 | GGGCAGGAGAUGUAGGAGG | 517 |
| | | | | | GGAACU | |
| 53335_5_119 | BCL11a | Exon 5 | − | chr2: 60452012-60452037 | GAGAAAUGGGCAGGAGAUG | 518 |
| | | | | | UAGGAG | |
| 53335_5_120 | BCL11a | Exon 5 | − | chr2: 60452013-60452038 | UGAGAAAUGGGCAGGAGAU | 519 |
| | | | | | GUAGGA | |
| 53335_5_121 | BCL11a | Exon 5 | − | chr2: 60452014-60452039 | UUGAGAAAUGGGCAGGAGA | 520 |
| | | | | | UGUAGG | |
| 53335_5_122 | BCL11a | Exon 5 | − | chr2: 60452017-60452042 | GAUUUGAGAAAUGGGCAGG | 521 |
| | | | | | AGAUGU | |
| 53335_5_123 | BCL11a | Exon 5 | − | chr2: 60452026-60452051 | GGAGGAACAGAUUUGAGAA | 522 |
| | | | | | AUGGGC | |
| 53335_5_124 | BCL11a | Exon 5 | − | chr2: 60452030-60452055 | GGUAGGAGGAACAGAUUUG | 523 |
| | | | | | AGAAAU | |
| 53335_5_125 | BCL11a | Exon 5 | − | chr2: 60452031-60452056 | GGGUAGGAGGAACAGAUUU | 524 |
| | | | | | GAGAAA | |
| 53335_5_126 | BCL11a | Exon 5 | − | chr2: 60452049-60452074 | UACAGACACCCAUCGGGUG | 525 |
| | | | | | GGUAGG | |
| 53335_5_127 | BCL11a | Exon 5 | − | chr2: 60452052-60452077 | UCCUACAGACACCCAUCGG | 526 |
| | | | | | GUGGGU | |
| 53335_5_128 | BCL11a | Exon 5 | − | chr2: 60452056-60452081 | UGUUUCCUACAGACACCCA | 527 |
| | | | | | UCGGGU | |
| 53335_5_129 | BCL11a | Exon 5 | − | chr2: 60452057-60452082 | CUGUUUCCUACAGACACCC | 528 |
| | | | | | AUCGGG | |
| 53335_5_130 | BCL11a | Exon 5 | − | chr2: 60452060-60452085 | UACCUGUUUCCUACAGACA | 529 |
| | | | | | CCCAUC | |
| 53335_5_131 | BCL11a | Exon 5 | − | chr2: 60452061-60452086 | GUACCUGUUUCCUACAGAC | 530 |
| | | | | | ACCCAU | |
| 53335_5_132 | BCL11a | Exon 5 | − | chr2: 60452111-60452136 | AAUUUUUAAUGCUUAUAAG | 531 |
| | | | | | ACAAUG | |
| 53335_5_133 | BCL11a | Exon 5 | − | chr2: 60452155-60452180 | ACACAAUAAAUGUUGGAGC | 532 |
| | | | | | UUUAGG | |
| 53335_5_134 | BCL11a | Exon 5 | − | chr2: 60452158-60452183 | UUGACACAAUAAAUGUUGG | 533 |
| | | | | | AGCUUU | |
| 53335_5_135 | BCL11a | Exon 5 | − | chr2: 60452167-60452192 | UGCUUAACAUUGACACAAU | 534 |
| | | | | | AAAUGU | |
| 53335_5_136 | BCL11a | Exon 5 | − | chr2: 60452256-60452281 | CCAGCCAACCUAAUUACCU | 535 |
| | | | | | GUAUUG | |
| 53335_5_137 | BCL11a | Exon 5 | − | chr2: 60452295-60452320 | ACCAUCGCUGUCAUGAGUG | 536 |
| | | | | | AUGCCC | |
| 53335_5_138 | BCL11a | Exon 5 | − | chr2: 60452323-60452348 | GAAUCAGUCCCAUAGAGAG | 537 |
| | | | | | GGCCCG | |
| 53335_5_139 | BCL11a | Exon 5 | − | chr2: 60452330-60452355 | GAACAGUGAAUCAGUCCCA | 538 |
| | | | | | UAGAGA | |
| 53335_5_140 | BCL11a | Exon 5 | − | chr2: 60452331-60452356 | GGAACAGUGAAUCAGUCCC | 539 |
| | | | | | AUAGAG | |
| 53335_5_141 | BCL11a | Exon 5 | − | chr2: 60452357-60452382 | UAAAAACAAAAAAACAGAC | 540 |
| | | | | | CCACAU | |
| 53335_5_142 | BCL11a | Exon 5 | − | chr2: 60452423-60452448 | GAGUCCUGCAGAGUCCUUC | 541 |
| | | | | | CAGCCU | |
| 53335_5_143 | BCL11a | Exon 5 | − | chr2: 60452517-60452542 | GCGUGCCGCCCAGUCGACG | 542 |
| | | | | | UCAGCG | |
| 53335_5_144 | BCL11a | Exon 5 | − | chr2: 60452547-60452572 | AAAUUUGAAGCCCCCAGGG | 543 |
| | | | | | GUGGGG | |
| 53335_5_145 | BCL11a | Exon 5 | − | chr2: 60452550-60452575 | AGAAAAUUUGAAGCCCCCA | 544 |
| | | | | | GGGGUG | |
| 53335_5_146 | BCL11a | Exon 5 | − | chr2: 60452551-60452576 | GAGAAAAUUUGAAGCCCCC | 545 |
| | | | | | AGGGGU | |
| 53335_5_147 | BCL11a | Exon 5 | − | chr2: 60452552-60452577 | UGAGAAAAUUUGAAGCCCC | 546 |
| | | | | | CAGGGG | |
| 53335_5_148 | BCL11a | Exon 5 | − | chr2: 60452555-60452580 | UUCUGAGAAAAUUUGAAGC | 547 |
| | | | | | CCCCAG | |
| 53335_5_149 | BCL11a | Exon 5 | − | chr2: 60452556-60452581 | GUUCUGAGAAAAUUUGAAG | 548 |
| | | | | | CCCCCA | |
| 53335_5_150 | BCL11a | Exon 5 | − | chr2: 60452557-60452582 | AGUUCUGAGAAAAUUUGAA | 549 |
| | | | | | GCCCCC | |
| 53335_5_151 | BCL11a | Exon 5 | − | chr2: 60452602-60452627 | CUCAAGAUGUGUGGCAGUU | 550 |
| | | | | | UUCGGA | |
| 53335_5_152 | BCL11a | Exon 5 | − | chr2: 60452606-60452631 | AGAGCUCAAGAUGUGUGGC | 551 |
| | | | | | AGUUUU | |
| 53335_5_153 | BCL11a | Exon 5 | − | chr2: 60452616-60452641 | UAGUACCCAGAGAGCUCAA | 552 |
| | | | | | GAUGUG | |
| 53335_5_154 | BCL11a | Exon 5 | − | chr2: 60452646-60452671 | UCUAGGUUCUUCACACACC | 553 |
| | | | | | CCCAUU | |
| 53335_4_1 | BCL11a | Exon 4 | + | chr2: 60457199-60457224 | UUAAUUUUUUUUAUUUUUU | 554 |
| | | | | | CAAUAA | |
| 53335_4_2 | BCL11a | Exon 4 | + | chr2: 60457200-60457225 | UAAUUUUUUUUAUUUUUUC | 555 |
| | | | | | AAUAAA | |
| 53335_4_3 | BCL11a | Exon 4 | + | chr2: 60457209-60457234 | UUAUUUUUUCAAUAAAGGG | 556 |
| | | | | | ACAAAA | |
| 53335_4_4 | BCL11a | Exon 4 | + | chr2: 60457210-60457235 | UAUUUUUUCAAUAAAGGGA | 557 |
| | | | | | CAAAAU | |
| 53335_4_5 | BCL11a | Exon 4 | + | chr2: 60457222-60457247 | AAAGGGACAAAAUGGGUGU | 558 |
| | | | | | AUGAAC | |
| 53335_4_6 | BCL11a | Exon 4 | + | chr2: 60457259-60457284 | ACAACUGCCAAAAAAACAC | 559 |
| | | | | | AGACAG | |
| 53335_4_7 | BCL11a | Exon 4 | + | chr2: 60457312-60457337 | CCAGAAACAAAUACAAUAA | 560 |
| | | | | | AAAGCC | |
| 53335_4_8 | BCL11a | Exon 4 | + | chr2: 60457328-60457353 | UAAAAAGCCAGGUUGUAAU | 561 |
| | | | | | GACCUU | |
| 53335_4_9 | BCL11a | Exon 4 | + | chr2: 60457401-60457426 | CAAAUUAAGUGCCUCUGUU | 562 |
| | | | | | UUGAAC | |
| 53335_4_10 | BCL11a | Exon 4 | + | chr2: 60457402-60457427 | AAAUUAAGUGCCUCUGUUU | 563 |
| | | | | | UGAACA | |
| 53335_4_11 | BCL11a | Exon 4 | + | chr2: 60457480-60457505 | AGUUACGACAAACAGCUUU | 564 |
| | | | | | CAUUAC | |
| 53335_4_12 | BCL11a | Exon 4 | + | chr2: 60457491-60457516 | ACAGCUUUCAUUACAGGAA | 565 |
| | | | | | UAGAAA | |
| 53335_4_13 | BCL11a | Exon 4 | + | chr2: 60457545-60457570 | AUUUACAAAAAAGUAUUGA | 566 |
| | | | | | CUAAAG | |
| 53335_4_14 | BCL11a | Exon 4 | + | chr2: 60457546-60457571 | UUUACAAAAAAGUAUUGAC | 567 |
| | | | | | UAAAGC | |
| 53335_4_15 | BCL11a | Exon 4 | + | chr2: 60457616-60457641 | UAAAUAUAAAGCACCAUUU | 568 |
| | | | | | AGUUUU | |
| 53335_4_16 | BCL11a | Exon 4 | + | chr2: 60457642-60457667 | GGCAAUGAAAAAAACUGCA | 569 |
| | | | | | AAACAU | |
| 53335_4_17 | BCL11a | Exon 4 | + | chr2: 60457695-60457720 | UCUUUCUUUCUUUUACUGC | 570 |
| | | | | | AUAUGA | |
| 53335_4_18 | BCL11a | Exon 4 | + | chr2: 60457706-60457731 | UUUACUGCAUAUGAAGGUA | 571 |
| | | | | | AGAUGC | |
| 53335_4_19 | BCL11a | Exon 4 | + | chr2: 60457714-60457739 | AUAUGAAGGUAAGAUGCUG | 572 |
| | | | | | GAAUGU | |
| 53335_4_20 | BCL11a | Exon 4 | + | chr2: 60457715-60457740 | UAUGAAGGUAAGAUGCUGG | 573 |
| | | | | | AAUGUA | |
| 53335_4_21 | BCL11a | Exon 4 | + | chr2: 60457725-60457750 | AGAUGCUGGAAUGUAGGGU | 574 |
| | | | | | GAUAGA | |
| 53335_4_22 | BCL11a | Exon 4 | + | chr2: 60457730-60457755 | CUGGAAUGUAGGGUGAUAG | 575 |
| | | | | | AAGGAA | |
| 53335_4_23 | BCL11a | Exon 4 | + | chr2: 60457731-60457756 | UGGAAUGUAGGGUGAUAGA | 576 |
| | | | | | AGGAAA | |
| 53335_4_24 | BCL11a | Exon 4 | + | chr2: 60457792-60457817 | UUAGCUUGCAGUACUGCAU | 577 |
| | | | | | ACAGUA | |
| 53335_4_25 | BCL11a | Exon 4 | + | chr2: 60457799-60457824 | GCAGUACUGCAUACAGUAU | 578 |
| | | | | | GGCAGC | |
| 53335_4_26 | BCL11a | Exon 4 | + | chr2: 60457806-60457831 | UGCAUACAGUAUGGCAGCA | 579 |
| | | | | | GGAAAA | |
| 53335_4_27 | BCL11a | Exon 4 | + | chr2: 60457817-60457842 | UGGCAGCAGGAAAAAGGAA | 580 |
| | | | | | CAAAAA | |
| 53335_4_28 | BCL11a | Exon 4 | + | chr2: 60457863-60457888 | ACAGCCAUCCAUGUGACAU | 581 |
| | | | | | UCUAGC | |
| 53335_4_29 | BCL11a | Exon 4 | + | chr2: 60457887-60457912 | CAGGCUCCCCCAAACCGCC | 582 |
| | | | | | AUUAUA | |
| 53335_4_30 | BCL11a | Exon 4 | + | chr2: 60457996-60458021 | CCUGCCAAAUUAAAAAAAU | 583 |
| | | | | | AUACUG | |
| 53335_4_31 | BCL11a | Exon 4 | + | chr2: 60458031-60458056 | UCUUUUUUUUUUCCACUAC | 584 |
| | | | | | CAAAAA | |
| 53335_4_32 | BCL11a | Exon 4 | + | chr2: 60458178-60458203 | AAAGACCAUAAAUGUAUUU | 585 |
| | | | | | UAGCAU | |
| 53335_4_33 | BCL11a | Exon 4 | + | chr2: 60458274-60458299 | UUUUUUUUUUUUACAACCU | 586 |
| | | | | | GAAGAG | |
| 53335_4_34 | BCL11a | Exon 4 | + | chr2: 60458287-60458312 | CAACCUGAAGAGCGGUGUG | 587 |
| | | | | | UAUCCA | |
| 53335_4_35 | BCL11a | Exon 4 | + | chr2: 60458317-60458342 | UAGAAUUUCCACUACCAUU | 588 |
| | | | | | UUUAAA | |
| 53335_4_36 | BCL11a | Exon 4 | + | chr2: 60458350-60458375 | AAGUCUUGUAACACCACCA | 589 |
| | | | | | AGACAA | |
| 53335_4_37 | BCL11a | Exon 4 | + | chr2: 60458564-60458589 | UAAGUAAGCUCAAUAGUCA | 590 |
| | | | | | AGUAAA | |
| 53335_4_38 | BCL11a | Exon 4 | + | chr2: 60458568-60458593 | UAAGCUCAAUAGUCAAGUA | 591 |
| | | | | | AAUGGC | |
| 53335_4_39 | BCL11a | Exon 4 | + | chr2: 60458677-60458702 | UUCCCUUAAGUAUAGACCU | 592 |
| | | | | | GUAAAC | |
| 53335_4_40 | BCL11a | Exon 4 | + | chr2: 60458678-60458703 | UCCCUUAAGUAUAGACCUG | 593 |
| | | | | | UAAACU | |
| 53335_4_41 | BCL11a | Exon 4 | + | chr2: 60458717-60458742 | GUGCACUUAAUUGUCCUAU | 594 |
| | | | | | CUGAGC | |
| 53335_4_42 | BCL11a | Exon 4 | + | chr2: 60458775-60458800 | AUUAGAGAAAAGAUACAGA | 595 |
| | | | | | UAUCAC | |
| 53335_4_43 | BCL11a | Exon 4 | + | chr2: 60458806-60458831 | AGUCAAGUGCUAUUUGAAC | 596 |
| | | | | | ACCAAC | |
| 53335_4_44 | BCL11a | Exon 4 | + | chr2: 60458807-60458832 | GUCAAGUGCUAUUUGAACA | 597 |
| | | | | | CCAACU | |
| 53335_4_45 | BCL11a | Exon 4 | + | chr2: 60458808-60458833 | UCAAGUGCUAUUUGAACAC | 598 |
| | | | | | CAACUG | |
| 53335_4_46 | BCL11a | Exon 4 | + | chr2: 60458904-60458929 | GUUAACACAAAUAGCACAC | 599 |
| | | | | | AGUGUA | |
| 53335_4_47 | BCL11a | Exon 4 | + | chr2: 60458930-60458955 | GGAAAAGAAAUGAAGUACA | 600 |
| | | | | | ACUUUU | |
| 53335_4_48 | BCL11a | Exon 4 | + | chr2: 60458931-60458956 | GAAAAGAAAUGAAGUACAA | 601 |
| | | | | | CUUUUA | |
| 53335_4_49 | BCL11a | Exon 4 | + | chr2: 60459074-60459099 | CUUAUAUACCUGUUCUAGU | 602 |
| | | | | | UUUAAA | |
| 53335_4_50 | BCL11a | Exon 4 | + | chr2: 60459165-60459190 | UAUUGUCAGCCUCUUCCUU | 603 |
| | | | | | UCAAUA | |
| 53335_4_51 | BCL11a | Exon 4 | + | chr2: 60459174-60459199 | CCUCUUCCUUUCAAUAUGG | 604 |
| | | | | | UAUACA | |
| 53335_4_52 | BCL11a | Exon 4 | + | chr2: 60459223-60459248 | UGUCCACUUGACAACCAAG | 605 |
| | | | | | UAGAUC | |
| 53335_4_53 | BCL11a | Exon 4 | + | chr2: 60459238-60459263 | CAAGUAGAUCUGGAUCUAU | 606 |
| | | | | | UUCUUU | |
| 53335_4_54 | BCL11a | Exon 4 | + | chr2: 60459322-60459347 | UUACUAGUGUAUUUAAUUG | 607 |
| | | | | | CGUUCC | |
| 53335_4_55 | BCL11a | Exon 4 | + | chr2: 60459323-60459348 | UACUAGUGUAUUUAAUUGC | 608 |
| | | | | | GUUCCA | |
| 53335_4_56 | BCL11a | Exon 4 | + | chr2: 60459378-60459403 | UCAUUGUUUAAAAAAAAUA | 609 |
| | | | | | AAACUU | |
| 53335_4_57 | BCL11a | Exon 4 | + | chr2: 60459379-60459404 | CAUUGUUUAAAAAAAAUAA | 610 |
| | | | | | AACUUU | |
| 53335_4_58 | BCL11a | Exon 4 | + | chr2: 60459413-60459438 | AGCCCAUUUCUUUUAAGCU | 611 |
| | | | | | CUCACC | |
| 53335_4_59 | BCL11a | Exon 4 | + | chr2: 60459435-60459460 | ACCAGGAGCAAAGUAGCUU | 612 |
| | | | | | UUAUAC | |
| 53335_4_60 | BCL11a | Exon 4 | + | chr2: 60459470-60459495 | AGUUUUGUUUAUAAAAUUA | 613 |
| | | | | | AACUAA | |
| 53335_4_61 | BCL11a | Exon 4 | + | chr2: 60459490-60459515 | ACUAAAGGAAAAAUGAUGA | 614 |
| | | | | | UUAACU | |
| 53335_4_62 | BCL11a | Exon 4 | + | chr2: 60459499-60459524 | AAAAUGAUGAUUAACUAGG | 615 |
| | | | | | ACAUAA | |
| 53335_4_63 | BCL11a | Exon 4 | + | chr2: 60459500-60459525 | AAAUGAUGAUUAACUAGGA | 616 |
| | | | | | CAUAAU | |
| 53335_4_64 | BCL11a | Exon 4 | + | chr2: 60459513-60459538 | CUAGGACAUAAUGGGUCAU | 617 |
| | | | | | CUUUUU | |
| 53335_4_65 | BCL11a | Exon 4 | + | chr2: 60459564-60459589 | AUAUAGAAUUAUAUGCUAG | 618 |
| | | | | | UUCCUA | |
| 53335_4_66 | BCL11a | Exon 4 | + | chr2: 60459632-60459657 | UAACAAGUAGAAAGAACCA | 619 |
| | | | | | UCGAUG | |
| 53335_4_67 | BCL11a | Exon 4 | + | chr2: 60459649-60459674 | CAUCGAUGUGGUUUUAAUA | 620 |
| | | | | | GAUCCA | |
| 53335_4_68 | BCL11a | Exon 4 | + | chr2: 60459718-60459743 | GUUUUUCUGUUAAUUUGUC | 621 |
| | | | | | AAUUCA | |
| 53335_4_69 | BCL11a | Exon 4 | + | chr2: 60459818-60459843 | UCAGUGCUAUCUAUUCUGU | 622 |
| | | | | | CUAUAG | |
| 53335_4_70 | BCL11a | Exon 4 | + | chr2: 60459819-60459844 | CAGUGCUAUCUAUUCUGUC | 623 |
| | | | | | UAUAGA | |
| 53335_4_71 | BCL11a | Exon 4 | + | chr2: 60459900-60459925 | UAUGUAUUACAGAAUGUAU | 624 |
| | | | | | GCAGCA | |
| 53335_4_72 | BCL11a | Exon 4 | + | chr2: 60459937-60459962 | CUCUCUCUCUCUUUUUCUC | 625 |
| | | | | | UCAGAA | |
| 53335_4_73 | BCL11a | Exon 4 | + | chr2: 60459943-60459968 | CUCUCUUUUUCUCUCAGAA | 626 |
| | | | | | CGGAAC | |
| 53335_4_74 | BCL11a | Exon 4 | + | chr2: 60459977-60460002 | CAACAUGUUUGCUCAGCAA | 627 |
| | | | | | CGAAUU | |
| 53335_4_75 | BCL11a | Exon 4 | + | chr2: 60459978-60460003 | AACAUGUUUGCUCAGCAAC | 628 |
| | | | | | GAAUUA | |
| 53335_4_76 | BCL11a | Exon 4 | + | chr2: 60460068-60460093 | ACAUGUAAAUUAUUGCACA | 629 |
| | | | | | AGAGAA | |
| 53335_4_77 | BCL11a | Exon 4 | + | chr2: 60460126-60460151 | GCCCCAUACAGAUCAUGCA | 630 |
| | | | | | UUCAAA | |
| 53335_4_78 | BCL11a | Exon 4 | + | chr2: 60460140-60460165 | AUGCAUUCAAACGGUGAGA | 631 |
| | | | | | ACAUAA | |
| 53335_4_79 | BCL11a | Exon 4 | + | chr2: 60460193-60460218 | AAAGAAAAAGAAAAAGAAA | 632 |
| | | | | | AAAAAC | |
| 53335_4_80 | BCL11a | Exon 4 | + | chr2: 60460201-60460226 | AGAAAAAGAAAAAAAACAG | 633 |
| | | | | | GUGUGC | |
| 53335_4_81 | BCL11a | Exon 4 | + | chr2: 60460269-60460294 | UGUUUGUUUGUUUGUUUAA | 634 |
| | | | | | AUCACA | |
| 53335_4_82 | BCL11a | Exon 4 | + | chr2: 60460270-60460295 | GUUUGUUUGUUUGUUUAAA | 635 |
| | | | | | UCACAU | |
| 53335_4_83 | BCL11a | Exon 4 | + | chr2: 60460291-60460316 | ACAUGGGACUAGAAAAAAA | 636 |
| | | | | | UCCUAC | |
| 53335_4_84 | BCL11a | Exon 4 | + | chr2: 60460292-60460317 | CAUGGGACUAGAAAAAAAU | 637 |
| | | | | | CCUACA | |
| 53335_4_85 | BCL11a | Exon 4 | + | chr2: 60460297-60460322 | GACUAGAAAAAAAUCCUAC | 638 |
| | | | | | AGGGAG | |
| 53335_4_86 | BCL11a | Exon 4 | + | chr2: 60460298-60460323 | ACUAGAAAAAAAUCCUACA | 639 |
| | | | | | GGGAGU | |
| 53335_4_87 | BCL11a | Exon 4 | + | chr2: 60460299-60460324 | CUAGAAAAAAAUCCUACAG | 640 |
| | | | | | GGAGUG | |
| 53335_4_88 | BCL11a | Exon 4 | + | chr2: 60460303-60460328 | AAAAAAAUCCUACAGGGAG | 641 |
| | | | | | UGGGGC | |
| 53335_4_89 | BCL11a | Exon 4 | + | chr2: 60460306-60460331 | AAAAUCCUACAGGGAGUGG | 642 |
| | | | | | GGCUGG | |
| 53335_4_90 | BCL11a | Exon 4 | + | chr2: 60460307-60460332 | AAAUCCUACAGGGAGUGGG | 643 |
| | | | | | GCUGGA | |
| 53335_4_91 | BCL11a | Exon 4 | + | chr2: 60460313-60460338 | UACAGGGAGUGGGGCUGGA | 644 |
| | | | | | GGGCGA | |
| 53335_4_92 | BCL11a | Exon 4 | + | chr2: 60460314-60460339 | ACAGGGAGUGGGGCUGGAG | 645 |
| | | | | | GGCGAU | |
| 53335_4_93 | BCL11a | Exon 4 | + | chr2: 60460315-60460340 | CAGGGAGUGGGGCUGGAGG | 646 |
| | | | | | GCGAUG | |
| 53335_4_94 | BCL11a | Exon 4 | + | chr2: 60460319-60460344 | GAGUGGGGCUGGAGGGCGA | 647 |
| | | | | | UGGGGA | |
| 53335_4_95 | BCL11a | Exon 4 | + | chr2: 60460320-60460345 | AGUGGGGCUGGAGGGCGAU | 648 |
| | | | | | GGGGAA | |
| 53335_4_96 | BCL11a | Exon 4 | + | chr2: 60460321-60460346 | GUGGGGCUGGAGGGCGAUG | 649 |
| | | | | | GGGAAG | |
| 53335_4_97 | BCL11a | Exon 4 | + | chr2: 60460326-60460351 | GCUGGAGGGCGAUGGGGAA | 650 |
| | | | | | GGGGAG | |
| 53335_4_98 | BCL11a | Exon 4 | + | chr2: 60460335-60460360 | CGAUGGGGAAGGGGAGUGG | 651 |
| | | | | | UGAAAA | |
| 53335_4_99 | BCL11a | Exon 4 | + | chr2: 60460336-60460361 | GAUGGGGAAGGGGAGUGGU | 652 |
| | | | | | GAAAAA | |
| 53335_4_100 | BCL11a | Exon 4 | + | chr2: 60460337-60460362 | AUGGGGAAGGGGAGUGGUG | 653 |
| | | | | | AAAAAG | |
| 53335_4_101 | BCL11a | Exon 4 | + | chr2: 60460338-60460363 | UGGGGAAGGGGAGUGGUGA | 654 |
| | | | | | AAAAGG | |
| 53335_4_102 | BCL11a | Exon 4 | + | chr2: 60460345-60460370 | GGGGAGUGGUGAAAAAGGG | 655 |
| | | | | | GGUGUC | |
| 53335_4_103 | BCL11a | Exon 4 | + | chr2: 60460348-60460373 | GAGUGGUGAAAAAGGGGGU | 656 |
| | | | | | GUCAGG | |
| 53335_4_104 | BCL11a | Exon 4 | + | chr2: 60460349-60460374 | AGUGGUGAAAAAGGGGGUG | 657 |
| | | | | | UCAGGU | |
| 53335_4_105 | BCL11a | Exon 4 | + | chr2: 60460356-60460381 | AAAAAGGGGGUGUCAGGUG | 658 |
| | | | | | GGAGUG | |
| 53335_4_106 | BCL11a | Exon 4 | + | chr2: 60460357-60460382 | AAAAGGGGGUGUCAGGUGG | 659 |
| | | | | | GAGUGA | |
| 53335_4_107 | BCL11a | Exon 4 | + | chr2: 60460360-60460385 | AGGGGGUGUCAGGUGGGAG | 660 |
| | | | | | UGAGGG | |
| 53335_4_108 | BCL11a | Exon 4 | + | chr2: 60460361-60460386 | GGGGGUGUCAGGUGGGAGU | 661 |
| | | | | | GAGGGA | |
| 53335_4_109 | BCL11a | Exon 4 | + | chr2: 60460362-60460387 | GGGGUGUCAGGUGGGAGUG | 662 |
| | | | | | AGGGAG | |
| 53335_4_110 | BCL11a | Exon 4 | + | chr2: 60460442-60460467 | GUGCCAUUUUUUCAUGUGU | 663 |
| | | | | | UUCUCC | |
| 53335_4_111 | BCL11a | Exon 4 | + | chr2: 60460443-60460468 | UGCCAUUUUUUCAUGUGUU | 664 |
| | | | | | UCUCCA | |
| 53335_4_112 | BCL11a | Exon 4 | + | chr2: 60460462-60460487 | UCUCCAGGGUACUGUACAC | 665 |
| | | | | | GCUAAA | |
| 53335_4_113 | BCL11a | Exon 4 | + | chr2: 60460505-60460530 | ACAUUUGUAAACGUCCUUC | 666 |
| | | | | | CCCACC | |
| 53335_4_114 | BCL11a | Exon 4 | + | chr2: 60460527-60460552 | ACCUGGCCAUGCGUUUUCA | 667 |
| | | | | | UGUGCC | |
| 53335_4_115 | BCL11a | Exon 4 | + | chr2: 60460544-60460569 | CAUGUGCCUGGUGAGCUUG | 668 |
| | | | | | CUACUC | |
| 53335_4_116 | BCL11a | Exon 4 | + | chr2: 60460545-60460570 | AUGUGCCUGGUGAGCUUGC | 669 |
| | | | | | UACUCU | |
| 53335_4_117 | BCL11a | Exon 4 | + | chr2: 60460551-60460576 | CUGGUGAGCUUGCUACUCU | 670 |
| | | | | | GGGCAC | |
| 53335_4_118 | BCL11a | Exon 4 | + | chr2: 60460579-60460604 | CAUAGUUGCACAGCUCGCA | 671 |
| | | | | | UUUAUA | |
| 53335_4_119 | BCL11a | Exon 4 | + | chr2: 60460595-60460620 | GCAUUUAUAAGGCCUUUCG | 672 |
| | | | | | CCCGUG | |
| 53335_4_120 | BCL11a | Exon 4 | + | chr2: 60460607-60460632 | CCUUUCGCCCGUGUGGCUU | 673 |
| | | | | | CUCCUG | |
| 53335_4_121 | BCL11a | Exon 4 | + | chr2: 60460686-60460711 | UCGCUGCGUCUGCCCUCUU | 674 |
| | | | | | UUGAGC | |
| 53335_4_122 | BCL11a | Exon 4 | + | chr2: 60460687-60460712 | CGCUGCGUCUGCCCUCUUU | 675 |
| | | | | | UGAGCU | |
| 53335_4_123 | BCL11a | Exon 4 | + | chr2: 60460696-60460721 | UGCCCUCUUUUGAGCUGGG | 676 |
| | | | | | CCUGCC | |
| 53335_4_124 | BCL11a | Exon 4 | + | chr2: 60460697-60460722 | GCCCUCUUUUGAGCUGGGC | 677 |
| | | | | | CUGCCC | |
| 53335_4_125 | BCL11a | Exon 4 | + | chr2: 60460702-60460727 | CUUUUGAGCUGGGCCUGCC | 678 |
| | | | | | CGGGCC | |
| 53335_4_126 | BCL11a | Exon 4 | + | chr2: 60460715-60460740 | CCUGCCCGGGCCCGGACCA | 679 |
| | | | | | CUAAUA | |
| 53335_4_127 | BCL11a | Exon 4 | + | chr2: 60460716-60460741 | CUGCCCGGGCCCGGACCAC | 680 |
| | | | | | UAAUAU | |
| 53335_4_128 | BCL11a | Exon 4 | + | chr2: 60460717-60460742 | UGCCCGGGCCCGGACCACU | 681 |
| | | | | | AAUAUG | |
| 53335_4_129 | BCL11a | Exon 4 | + | chr2: 60460776-60460801 | CCCGAGAUCCCUCCGUCCA | 682 |
| | | | | | GCUCCC | |
| 53335_4_130 | BCL11a | Exon 4 | + | chr2: 60460777-60460802 | CCGAGAUCCCUCCGUCCAG | 683 |
| | | | | | CUCCCC | |
| 53335_4_131 | BCL11a | Exon 4 | + | chr2: 60460780-60460805 | AGAUCCCUCCGUCCAGCUC | 684 |
| | | | | | CCCGGG | |
| 53335_4_132 | BCL11a | Exon 4 | + | chr2: 60460785-60460810 | CCUCCGUCCAGCUCCCCGG | 685 |
| | | | | | GCGGUG | |
| 53335_4_133 | BCL11a | Exon 4 | + | chr2: 60460812-60460837 | GAGAAGCGCAAACUCCCGU | 686 |
| | | | | | UCUCCG | |
| 53335_4_134 | BCL11a | Exon 4 | + | chr2: 60460827-60460852 | CCGUUCUCCGAGGAGUGCU | 687 |
| | | | | | CCGACG | |
| 53335_4_135 | BCL11a | Exon 4 | + | chr2: 60460830-60460855 | UUCUCCGAGGAGUGCUCCG | 688 |
| | | | | | ACGAGG | |
| 53335_4_136 | BCL11a | Exon 4 | + | chr2: 60460837-60460862 | AGGAGUGCUCCGACGAGGA | 689 |
| | | | | | GGCAAA | |
| 53335_4_137 | BCL11a | Exon 4 | + | chr2: 60460848-60460873 | GACGAGGAGGCAAAAGGCG | 690 |
| | | | | | AUUGUC | |
| 53335_4_138 | BCL11a | Exon 4 | + | chr2: 60460865-60460890 | CGAUUGUCUGGAGUCUCCG | 691 |
| | | | | | AAGCUA | |
| 53335_4_139 | BCL11a | Exon 4 | + | chr2: 60460869-60460894 | UGUCUGGAGUCUCCGAAGC | 692 |
| | | | | | UAAGGA | |
| 53335_4_140 | BCL11a | Exon 4 | + | chr2: 60460870-60460895 | GUCUGGAGUCUCCGAAGCU | 693 |
| | | | | | AAGGAA | |
| 53335_4_141 | BCL11a | Exon 4 | + | chr2: 60460887-60460912 | CUAAGGAAGGGAUCUUUGA | 694 |
| | | | | | GCUGCC | |
| 53335_4_142 | BCL11a | Exon 4 | + | chr2: 60460890-60460915 | AGGAAGGGAUCUUUGAGCU | 695 |
| | | | | | GCCUGG | |
| 53335_4_143 | BCL11a | Exon 4 | + | chr2: 60460902-60460927 | UUGAGCUGCCUGGAGGCCG | 696 |
| | | | | | CGUAGC | |
| 53335_4_144 | BCL11a | Exon 4 | + | chr2: 60460935-60460960 | CACUGCGAGUACACGUUCU | 697 |
| | | | | | CCGUGU | |
| 53335_4_145 | BCL11a | Exon 4 | + | chr2: 60460936-60460961 | ACUGCGAGUACACGUUCUC | 698 |
| | | | | | CGUGUU | |
| 53335_4_146 | BCL11a | Exon 4 | + | chr2: 60460944-60460969 | UACACGUUCUCCGUGUUGG | 699 |
| | | | | | GCAUCG | |
| 53335_4_147 | BCL11a | Exon 4 | + | chr2: 60460948-60460973 | CGUUCUCCGUGUUGGGCAU | 700 |
| | | | | | CGCGGC | |
| 53335_4_148 | BCL11a | Exon 4 | + | chr2: 60460949-60460974 | GUUCUCCGUGUUGGGCAUC | 701 |
| | | | | | GCGGCC | |
| 53335_4_149 | BCL11a | Exon 4 | + | chr2: 60460950-60460975 | UUCUCCGUGUUGGGCAUCG | 702 |
| | | | | | CGGCCG | |
| 53335_4_150 | BCL11a | Exon 4 | + | chr2: 60460951-60460976 | UCUCCGUGUUGGGCAUCGC | 703 |
| | | | | | GGCCGG | |
| 53335_4_151 | BCL11a | Exon 4 | + | chr2: 60460955-60460980 | CGUGUUGGGCAUCGCGGCC | 704 |
| | | | | | GGGGGC | |
| 53335_4_152 | BCL11a | Exon 4 | + | chr2: 60460992-60461017 | UUCUCGAGCUUGAUGCGCU | 705 |
| | | | | | UAGAGA | |
| 53335_4_153 | BCL11a | Exon 4 | + | chr2: 60460993-60461018 | UCUCGAGCUUGAUGCGCUU | 706 |
| | | | | | AGAGAA | |
| 53335_4_154 | BCL11a | Exon 4 | + | chr2: 60460994-60461019 | CUCGAGCUUGAUGCGCUUA | 707 |
| | | | | | GAGAAG | |
| 53335_4_155 | BCL11a | Exon 4 | + | chr2: 60461007-60461032 | CGCUUAGAGAAGGGGCUCA | 708 |
| | | | | | GCGAGC | |
| 53335_4_156 | BCL11a | Exon 4 | + | chr2: 60461008-60461033 | GCUUAGAGAAGGGGCUCAG | 709 |
| | | | | | CGAGCU | |
| 53335_4_157 | BCL11a | Exon 4 | + | chr2: 60461009-60461034 | CUUAGAGAAGGGGCUCAGC | 710 |
| | | | | | GAGCUG | |
| 53335_4_158 | BCL11a | Exon 4 | + | chr2: 60461031-60461056 | CUGGGGCUGCCCAGCAGCA | 711 |
| | | | | | GCUUUU | |
| 53335_4_159 | BCL11a | Exon 4 | + | chr2: 60461036-60461061 | GCUGCCCAGCAGCAGCUUU | 712 |
| | | | | | UUGGAC | |
| 53335_4_160 | BCL11a | Exon 4 | + | chr2: 60461046-60461071 | AGCAGCUUUUUGGACAGGC | 713 |
| | | | | | CCCCCG | |
| 53335_4_161 | BCL11a | Exon 4 | + | chr2: 60461059-60461084 | ACAGGCCCCCCGAGGCCGA | 714 |
| | | | | | CUCGCC | |
| 53335_4_162 | BCL11a | Exon 4 | + | chr2: 60461060-60461085 | CAGGCCCCCCGAGGCCGAC | 715 |
| | | | | | UCGCCC | |
| 53335_4_163 | BCL11a | Exon 4 | + | chr2: 60461061-60461086 | AGGCCCCCCGAGGCCGACU | 716 |
| | | | | | CGCCCG | |
| 53335_4_164 | BCL11a | Exon 4 | + | chr2: 60461072-60461097 | GGCCGACUCGCCCGGGGAG | 717 |
| | | | | | CAGCCG | |
| 53335_4_165 | BCL11a | Exon 4 | + | chr2: 60461099-60461124 | GCCAUUAACAGUGCCAUCG | 718 |
| | | | | | UCUAUG | |
| 53335_4_166 | BCL11a | Exon 4 | + | chr2: 60461112-60461137 | CCAUCGUCUAUGCGGUCCG | 719 |
| | | | | | ACUCGC | |
| 53335_4_167 | BCL11a | Exon 4 | + | chr2: 60461144-60461169 | CGAGUCUUCGUCGCAAGUG | 720 |
| | | | | | UCCCUG | |
| 53335_4_168 | BCL11a | Exon 4 | + | chr2: 60461151-60461176 | UCGUCGCAAGUGUCCCUGU | 721 |
| | | | | | GGCCCU | |
| 53335_4_169 | BCL11a | Exon 4 | + | chr2: 60461157-60461182 | CAAGUGUCCCUGUGGCCCU | 722 |
| | | | | | CGGCCU | |
| 53335_4_170 | BCL11a | Exon 4 | + | chr2: 60461162-60461187 | GUCCCUGUGGCCCUCGGCC | 723 |
| | | | | | UCGGCC | |
| 53335_4_171 | BCL11a | Exon 4 | + | chr2: 60461165-60461190 | CCUGUGGCCCUCGGCCUCG | 724 |
| | | | | | GCCAGG | |
| 53335_4_172 | BCL11a | Exon 4 | + | chr2: 60461189-60461214 | GUGGCCGCGCUUAUGCUUC | 725 |
| | | | | | UCGCCC | |
| 53335_4_173 | BCL11a | Exon 4 | + | chr2: 60461195-60461220 | GCGCUUAUGCUUCUCGCCC | 726 |
| | | | | | AGGACC | |
| 53335_4_174 | BCL11a | Exon 4 | + | chr2: 60461198-60461223 | CUUAUGCUUCUCGCCCAGG | 727 |
| | | | | | ACCUGG | |
| 53335_4_175 | BCL11a | Exon 4 | + | chr2: 60461202-60461227 | UGCUUCUCGCCCAGGACCU | 728 |
| | | | | | GGUGGA | |
| 53335_4_176 | BCL11a | Exon 4 | + | chr2: 60461223-60461248 | UGGAAGGCCUCGCUGAAGU | 729 |
| | | | | | GCUGCA | |
| 53335_4_177 | BCL11a | Exon 4 | + | chr2: 60461253-60461278 | CUGAGCACCAUGCCCUGCA | 730 |
| | | | | | UGACGU | |
| 53335_4_178 | BCL11a | Exon 4 | + | chr2: 60461254-60461279 | UGAGCACCAUGCCCUGCAU | 731 |
| | | | | | GACGUC | |
| 53335_4_179 | BCL11a | Exon 4 | + | chr2: 60461258-60461283 | CACCAUGCCCUGCAUGACG | 732 |
| | | | | | UCGGGC | |
| 53335_4_180 | BCL11a | Exon 4 | + | chr2: 60461259-60461284 | ACCAUGCCCUGCAUGACGU | 733 |
| | | | | | CGGGCA | |
| 53335_4_181 | BCL11a | Exon 4 | + | chr2: 60461264-60461289 | GCCCUGCAUGACGUCGGGC | 734 |
| | | | | | AGGGCG | |
| 53335_4_182 | BCL11a | Exon 4 | + | chr2: 60461312-60461337 | GACCGCGCCCCGCGAGCUG | 735 |
| | | | | | UUCUCG | |
| 53335_4_183 | BCL11a | Exon 4 | + | chr2: 60461315-60461340 | CGCGCCCCGCGAGCUGUUC | 736 |
| | | | | | UCGUGG | |
| 53335_4_184 | BCL11a | Exon 4 | + | chr2: 60461330-60461355 | GUUCUCGUGGUGGCGCGCC | 737 |
| | | | | | GCCUCC | |
| 53335_4_185 | BCL11a | Exon 4 | + | chr2: 60461446-60461471 | CCUCUUCCUCCUCGUCCCCG | 738 |
| | | | | | UUCUC | |
| 53335_4_186 | BCL11a | Exon 4 | + | chr2: 60461447-60461472 | CUCUUCCUCCUCGUCCCCG | 739 |
| | | | | | UUCUCC | |
| 53335_4_187 | BCL11a | Exon 4 | + | chr2: 60461453-60461478 | CUCCUCGUCCCCGUUCUCC | 740 |
| | | | | | GGGAUC | |
| 53335_4_188 | BCL11a | Exon 4 | + | chr2: 60461457-60461482 | UCGUCCCCGUUCUCCGGGA | 741 |
| | | | | | UCAGGU | |
| 53335_4_189 | BCL11a | Exon 4 | + | chr2: 60461458-60461483 | CGUCCCCGUUCUCCGGGAU | 742 |
| | | | | | CAGGUU | |
| 53335_4_190 | BCL11a | Exon 4 | + | chr2: 60461459-60461484 | GUCCCCGUUCUCCGGGAUC | 743 |
| | | | | | AGGUUG | |
| 53335_4_191 | BCL11a | Exon 4 | + | chr2: 60461481-60461506 | UUGGGGUCGUUCUCGCUCU | 744 |
| | | | | | UGAACU | |
| 53335_4_192 | BCL11a | Exon 4 | + | chr2: 60461490-60461515 | UUCUCGCUCUUGAACUUGG | 745 |
| | | | | | CCACCA | |
| 53335_4_193 | BCL11a | Exon 4 | + | chr2: 60461508-60461533 | GCCACCACGGACUUGAGCG | 746 |
| | | | | | CGCUGC | |
| 53335_4_194 | BCL11a | Exon 4 | + | chr2: 60461529-60461554 | CUGCUGGCGCUGCCCACCA | 747 |
| | | | | | AGUCGC | |
| 53335_4_195 | BCL11a | Exon 4 | + | chr2: 60461535-60461560 | GCGCUGCCCACCAAGUCGC | 748 |
| | | | | | UGGUGC | |
| 53335_4_196 | BCL11a | Exon 4 | + | chr2: 60461536-60461561 | CGCUGCCCACCAAGUCGCU | 749 |
| | | | | | GGUGCC | |
| 53335_4_197 | BCL11a | Exon 4 | + | chr2: 60461542-60461567 | CCACCAAGUCGCUGGUGCC | 750 |
| | | | | | GGGUUC | |
| 53335_4_198 | BCL11a | Exon 4 | + | chr2: 60461543-60461568 | CACCAAGUCGCUGGUGCCG | 751 |
| | | | | | GGUUCC | |
| 53335_4_199 | BCL11a | Exon 4 | + | chr2: 60461544-60461569 | ACCAAGUCGCUGGUGCCGG | 752 |
| | | | | | GUUCCG | |
| 53335_4_200 | BCL11a | Exon 4 | + | chr2: 60461550-60461575 | UCGCUGGUGCCGGGUUCCG | 753 |
| | | | | | GGGAGC | |
| 53335_4_201 | BCL11a | Exon 4 | + | chr2: 60461553-60461578 | CUGGUGCCGGGUUCCGGGG | 754 |
| | | | | | AGCUGG | |
| 53335_4_202 | BCL11a | Exon 4 | + | chr2: 60461556-60461581 | GUGCCGGGUUCCGGGGAGC | 755 |
| | | | | | UGGCGG | |
| 53335_4_203 | BCL11a | Exon 4 | + | chr2: 60461571-60461596 | GAGCUGGCGGUGGAGAGAC | 756 |
| | | | | | CGUCGU | |
| 53335_4_204 | BCL11a | Exon 4 | + | chr2: 60461586-60461611 | AGACCGUCGUCGGACUUGA | 757 |
| | | | | | CCGUCA | |
| 53335_4_205 | BCL11a | Exon 4 | + | chr2: 60461587-60461612 | GACCGUCGUCGGACUUGAC | 758 |
| | | | | | CGUCAU | |
| 53335_4_206 | BCL11a | Exon 4 | + | chr2: 60461588-60461613 | ACCGUCGUCGGACUUGACC | 759 |
| | | | | | GUCAUG | |
| 53335_4_207 | BCL11a | Exon 4 | + | chr2: 60461589-60461614 | CCGUCGUCGGACUUGACCG | 760 |
| | | | | | UCAUGG | |
| 53335_4_208 | BCL11a | Exon 4 | + | chr2: 60461618-60461643 | CGAUUUGUGCAUGUGCGUC | 761 |
| | | | | | UUCAUG | |
| 53335_4_209 | BCL11a | Exon 4 | + | chr2: 60461634-60461659 | GUCUUCAUGUGGCGCUUCA | 762 |
| | | | | | GCUUGC | |
| 53335_4_210 | BCL11a | Exon 4 | + | chr2: 60461639-60461664 | CAUGUGGCGCUUCAGCUUG | 763 |
| | | | | | CUGGCC | |
| 53335_4_211 | BCL11a | Exon 4 | + | chr2: 60461640-60461665 | AUGUGGCGCUUCAGCUUGC | 764 |
| | | | | | UGGCCU | |
| 53335_4_212 | BCL11a | Exon 4 | + | chr2: 60461651-60461676 | CAGCUUGCUGGCCUGGGUG | 765 |
| | | | | | CACGCG | |
| 53335_4_213 | BCL11a | Exon 4 | + | chr2: 60461660-60461685 | GGCCUGGGUGCACGCGUGG | 766 |
| | | | | | UCGCAC | |
| 53335_4_214 | BCL11a | Exon 4 | + | chr2: 60461673-60461698 | GCGUGGUCGCACAGGUUGC | 767 |
| | | | | | ACUUGU | |
| 53335_4_215 | BCL11a | Exon 4 | + | chr2: 60461674-60461699 | CGUGGUCGCACAGGUUGCA | 768 |
| | | | | | CUUGUA | |
| 53335_4_216 | BCL11a | Exon 4 | + | chr2: 60461690-60461715 | GCACUUGUAGGGCUUCUCG | 769 |
| | | | | | CCCGUG | |
| 53335_4_217 | BCL11a | Exon 4 | + | chr2: 60461699-60461724 | GGGCUUCUCGCCCGUGUGG | 770 |
| | | | | | CUGCGC | |
| 53335_4_218 | BCL11a | Exon 4 | + | chr2: 60461711-60461736 | CGUGUGGCUGCGCCGGUGC | 771 |
| | | | | | ACCACC | |
| 53335_4_219 | BCL11a | Exon 4 | + | chr2: 60461757-60461782 | GUCUUGCCGCAGAACUCGC | 772 |
| | | | | | AUGACU | |
| 53335_4_220 | BCL11a | Exon 4 | + | chr2: 60461767-60461792 | AGAACUCGCAUGACUUGGA | 773 |
| | | | | | CUUGAC | |
| 53335_4_221 | BCL11a | Exon 4 | + | chr2: 60461768-60461793 | GAACUCGCAUGACUUGGAC | 774 |
| | | | | | UUGACC | |
| 53335_4_222 | BCL11a | Exon 4 | + | chr2: 60461769-60461794 | AACUCGCAUGACUUGGACU | 775 |
| | | | | | UGACCG | |
| 53335_4_223 | BCL11a | Exon 4 | + | chr2: 60461770-60461795 | ACUCGCAUGACUUGGACUU | 776 |
| | | | | | GACCGG | |
| 53335_4_224 | BCL11a | Exon 4 | + | chr2: 60461774-60461799 | GCAUGACUUGGACUUGACC | 777 |
| | | | | | GGGGGC | |
| 53335_4_225 | BCL11a | Exon 4 | + | chr2: 60461775-60461800 | CAUGACUUGGACUUGACCG | 778 |
| | | | | | GGGGCU | |
| 53335_4_226 | BCL11a | Exon 4 | + | chr2: 60461778-60461803 | GACUUGGACUUGACCGGGG | 779 |
| | | | | | GCUGGG | |
| 53335_4_227 | BCL11a | Exon 4 | + | chr2: 60461779-60461804 | ACUUGGACUUGACCGGGGG | 780 |
| | | | | | CUGGGA | |
| 53335_4_228 | BCL11a | Exon 4 | + | chr2: 60461782-60461807 | UGGACUUGACCGGGGGCUG | 781 |
| | | | | | GGAGGG | |
| 53335_4_229 | BCL11a | Exon 4 | + | chr2: 60461785-60461810 | ACUUGACCGGGGGCUGGGA | 782 |
| | | | | | GGGAGG | |
| 53335_4_230 | BCL11a | Exon 4 | + | chr2: 60461786-60461811 | CUUGACCGGGGGCUGGGAG | 783 |
| | | | | | GGAGGA | |
| 53335_4_231 | BCL11a | Exon 4 | + | chr2: 60461787-60461812 | UUGACCGGGGGCUGGGAGG | 784 |
| | | | | | GAGGAG | |
| 53335_4_232 | BCL11a | Exon 4 | + | chr2: 60461790-60461815 | ACCGGGGGCUGGGAGGGAG | 785 |
| | | | | | GAGGGG | |
| 53335_4_233 | BCL11a | Exon 4 | + | chr2: 60461800-60461825 | GGGAGGGAGGAGGGGCGGA | 786 |
| | | | | | UUGCAG | |
| 53335_4_234 | BCL11a | Exon 4 | + | chr2: 60461803-60461828 | AGGGAGGAGGGGCGGAUUG | 787 |
| | | | | | CAGAGG | |
| 53335_4_235 | BCL11a | Exon 4 | + | chr2: 60461804-60461829 | GGGAGGAGGGGCGGAUUGC | 788 |
| | | | | | AGAGGA | |
| 53335_4_236 | BCL11a | Exon 4 | + | chr2: 60461807-60461832 | AGGAGGGGCGGAUUGCAGA | 789 |
| | | | | | GGAGGG | |
| 53335_4_237 | BCL11a | Exon 4 | + | chr2: 60461808-60461833 | GGAGGGGCGGAUUGCAGAG | 790 |
| | | | | | GAGGGA | |
| 53335_4_238 | BCL11a | Exon 4 | + | chr2: 60461809-60461834 | GAGGGGCGGAUUGCAGAGG | 791 |
| | | | | | AGGGAG | |
| 53335_4_239 | BCL11a | Exon 4 | + | chr2: 60461810-60461835 | AGGGGCGGAUUGCAGAGGA | 792 |
| | | | | | GGGAGG | |
| 53335_4_240 | BCL11a | Exon 4 | + | chr2: 60461811-60461836 | GGGGCGGAUUGCAGAGGAG | 793 |
| | | | | | GGAGGG | |
| 53335_4_241 | BCL11a | Exon 4 | + | chr2: 60461812-60461837 | GGGCGGAUUGCAGAGGAGG | 794 |
| | | | | | GAGGGG | |
| 53335_4_242 | BCL11a | Exon 4 | + | chr2: 60461822-60461847 | CAGAGGAGGGAGGGGGGGC | 795 |
| | | | | | GUCGCC | |
| 53335_4_243 | BCL11a | Exon 4 | + | chr2: 60461826-60461851 | GGAGGGAGGGGGGGCGUCG | 796 |
| | | | | | CCAGGA | |
| 53335_4_244 | BCL11a | Exon 4 | + | chr2: 60461827-60461852 | GAGGGAGGGGGGGCGUCGC | 797 |
| | | | | | CAGGAA | |
| 53335_4_245 | BCL11a | Exon 4 | + | chr2: 60461830-60461855 | GGAGGGGGGGCGUCGCCAG | 798 |
| | | | | | GAAGGG | |
| 53335_4_246 | BCL11a | Exon 4 | + | chr2: 60461842-60461867 | UCGCCAGGAAGGGCGGCUU | 799 |
| | | | | | GCUACC | |
| 53335_4_247 | BCL11a | Exon 4 | + | chr2: 60461846-60461871 | CAGGAAGGGCGGCUUGCUA | 800 |
| | | | | | CCUGGC | |
| 53335_4_248 | BCL11a | Exon 4 | + | chr2: 60461851-60461876 | AGGGCGGCUUGCUACCUGG | 801 |
| | | | | | CUGGAA | |
| 53335_4_249 | BCL11a | Exon 4 | + | chr2: 60461872-60461897 | GGAAUGGUUGCAGUAACCU | 802 |
| | | | | | UUGCAU | |
| 53335_4_250 | BCL11a | Exon 4 | + | chr2: 60461873-60461898 | GAAUGGUUGCAGUAACCUU | 803 |
| | | | | | UGCAUA | |
| 53335_4_251 | BCL11a | Exon 4 | + | chr2: 60461877-60461902 | GGUUGCAGUAACCUUUGCA | 804 |
| | | | | | UAGGGC | |
| 53335_4_252 | BCL11a | Exon 4 | + | chr2: 60461878-60461903 | GUUGCAGUAACCUUUGCAU | 805 |
| | | | | | AGGGCU | |
| 53335_4_253 | BCL11a | Exon 4 | + | chr2: 60461882-60461907 | CAGUAACCUUUGCAUAGGG | 806 |
| | | | | | CUGGGC | |
| 53335_4_254 | BCL11a | Exon 4 | + | chr2: 60461887-60461912 | ACCUUUGCAUAGGGCUGGG | 807 |
| | | | | | CCGGCC | |
| 53335_4_255 | BCL11a | Exon 4 | + | chr2: 60461888-60461913 | CCUUUGCAUAGGGCUGGGC | 808 |
| | | | | | CGGCCU | |
| 53335_4_256 | BCL11a | Exon 4 | + | chr2: 60461889-60461914 | CUUUGCAUAGGGCUGGGCC | 809 |
| | | | | | GGCCUG | |
| 53335_4_257 | BCL11a | Exon 4 | + | chr2: 60461896-60461921 | UAGGGCUGGGCCGGCCUGG | 810 |
| | | | | | GGACAG | |
| 53335_4_258 | BCL11a | Exon 4 | + | chr2: 60461899-60461924 | GGCUGGGCCGGCCUGGGGA | 811 |
| | | | | | CAGCGG | |
| 53335_4_259 | BCL11a | Exon 4 | + | chr2: 60461900-60461925 | GCUGGGCCGGCCUGGGGAC | 812 |
| | | | | | AGCGGU | |
| 53335_4_260 | BCL11a | Exon 4 | + | chr2: 60461949-60461974 | UCUCUAAGUCUCCUAGAGA | 813 |
| | | | | | AAUCCA | |
| 53335_4_261 | BCL11a | Exon 4 | + | chr2: 60461952-60461977 | CUAAGUCUCCUAGAGAAAU | 814 |
| | | | | | CCAUGG | |
| 53335_4_262 | BCL11a | Exon 4 | + | chr2: 60461953-60461978 | UAAGUCUCCUAGAGAAAUC | 815 |
| | | | | | CAUGGC | |
| 53335_4_263 | BCL11a | Exon 4 | + | chr2: 60461956-60461981 | GUCUCCUAGAGAAAUCCAU | 816 |
| | | | | | GGCGGG | |
| 53335_4_264 | BCL11a | Exon 4 | + | chr2: 60461971-60461996 | CCAUGGCGGGAGGCUCCAU | 817 |
| | | | | | AGCCAU | |
| 53335_4_265 | BCL11a | Exon 4 | + | chr2: 60461997-60462022 | GGAUUCAACCGCAGCACCC | 818 |
| | | | | | UGUCAA | |
| 53335_4_266 | BCL11a | Exon 4 | + | chr2: 60462004-60462029 | ACCGCAGCACCCUGUCAAA | 819 |
| | | | | | GGCACU | |
| 53335_4_267 | BCL11a | Exon 4 | + | chr2: 60462005-60462030 | CCGCAGCACCCUGUCAAAG | 820 |
| | | | | | GCACUC | |
| 53335_4_268 | BCL11a | Exon 4 | + | chr2: 60462011-60462036 | CACCCUGUCAAAGGCACUC | 821 |
| | | | | | GGGUGA | |
| 53335_4_269 | BCL11a | Exon 4 | + | chr2: 60462012-60462037 | ACCCUGUCAAAGGCACUCG | 822 |
| | | | | | GGUGAU | |
| 53335_4_270 | BCL11a | Exon 4 | + | chr2: 60462015-60462040 | CUGUCAAAGGCACUCGGGU | 823 |
| | | | | | GAUGGG | |
| 53335_4_271 | BCL11a | Exon 4 | + | chr2: 60462020-60462045 | AAAGGCACUCGGGUGAUGG | 824 |
| | | | | | GUGGCC | |
| 53335_4_272 | BCL11a | Exon 4 | + | chr2: 60462021-60462046 | AAGGCACUCGGGUGAUGGG | 825 |
| | | | | | UGGCCA | |
| 53335_4_273 | BCL11a | Exon 4 | + | chr2: 60462041-60462066 | GGCCAGGGCCAUCUCUUCC | 826 |
| | | | | | GCCCCC | |
| 53335_4_274 | BCL11a | Exon 4 | + | chr2: 60462053-60462078 | CUCUUCCGCCCCCAGGCGC | 827 |
| | | | | | UCUAUG | |
| 53335_4_275 | BCL11a | Exon 4 | + | chr2: 60462056-60462081 | UUCCGCCCCCAGGCGCUCU | 828 |
| | | | | | AUGCGG | |
| 53335_4_276 | BCL11a | Exon 4 | + | chr2: 60462057-60462082 | UCCGCCCCCAGGCGCUCUA | 829 |
| | | | | | UGCGGU | |
| 53335_4_277 | BCL11a | Exon 4 | + | chr2: 60462058-60462083 | CCGCCCCCAGGCGCUCUAU | 830 |
| | | | | | GCGGUG | |
| 53335_4_278 | BCL11a | Exon 4 | + | chr2: 60462059-60462084 | CGCCCCCAGGCGCUCUAUG | 831 |
| | | | | | CGGUGG | |
| 53335_4_279 | BCL11a | Exon 4 | + | chr2: 60462076-60462101 | UGCGGUGGGGGUCCAAGUG | 832 |
| | | | | | AUGUCU | |
| 53335_4_280 | BCL11a | Exon 4 | + | chr2: 60462079-60462104 | GGUGGGGGUCCAAGUGAUG | 833 |
| | | | | | UCUCGG | |
| 53335_4_281 | BCL11a | Exon 4 | + | chr2: 60462082-60462107 | GGGGGUCCAAGUGAUGUCU | 834 |
| | | | | | CGGUGG | |
| 53335_4_282 | BCL11a | Exon 4 | + | chr2: 60462092-60462117 | GUGAUGUCUCGGUGGUGGA | 835 |
| | | | | | CUAAAC | |
| 53335_4_283 | BCL11a | Exon 4 | + | chr2: 60462093-60462118 | UGAUGUCUCGGUGGUGGAC | 836 |
| | | | | | UAAACA | |
| 53335_4_284 | BCL11a | Exon 4 | + | chr2: 60462094-60462119 | GAUGUCUCGGUGGUGGACU | 837 |
| | | | | | AAACAG | |
| 53335_4_285 | BCL11a | Exon 4 | + | chr2: 60462095-60462120 | AUGUCUCGGUGGUGGACUA | 838 |
| | | | | | AACAGG | |
| 53335_4_286 | BCL11a | Exon 4 | + | chr2: 60462096-60462121 | UGUCUCGGUGGUGGACUAA | 839 |
| | | | | | ACAGGG | |
| 53335_4_287 | BCL11a | Exon 4 | + | chr2: 60462097-60462122 | GUCUCGGUGGUGGACUAAA | 840 |
| | | | | | CAGGGG | |
| 53335_4_288 | BCL11a | Exon 4 | + | chr2: 60462102-60462127 | GGUGGUGGACUAAACAGGG | 841 |
| | | | | | GGGGAG | |
| 53335_4_289 | BCL11a | Exon 4 | + | chr2: 60462103-60462128 | GUGGUGGACUAAACAGGGG | 842 |
| | | | | | GGGAGU | |
| 53335_4_290 | BCL11a | Exon 4 | + | chr2: 60462106-60462131 | GUGGACUAAACAGGGGGGG | 843 |
| | | | | | AGUGGG | |
| 53335_4_291 | BCL11a | Exon 4 | + | chr2: 60462125-60462150 | AGUGGGUGGAAAGCGCCCU | 844 |
| | | | | | UCUGCC | |
| 53335_4_292 | BCL11a | Exon 4 | + | chr2: 60462129-60462154 | GGUGGAAAGCGCCCUUCUG | 845 |
| | | | | | CCAGGC | |
| 53335_4_293 | BCL11a | Exon 4 | + | chr2: 60462154-60462179 | CGGAAGCCUCUCUCGAUAC | 846 |
| | | | | | UGAUCC | |
| 53335_4_294 | BCL11a | Exon 4 | + | chr2: 60462167-60462192 | CGAUACUGAUCCUGGUAUU | 847 |
| | | | | | CUUAGC | |
| 53335_4_295 | BCL11a | Exon 4 | + | chr2: 60462174-60462199 | GAUCCUGGUAUUCUUAGCA | 848 |
| | | | | | GGUUAA | |
| 53335_4_296 | BCL11a | Exon 4 | + | chr2: 60462175-60462200 | AUCCUGGUAUUCUUAGCAG | 849 |
| | | | | | GUUAAA | |
| 53335_4_297 | BCL11a | Exon 4 | + | chr2: 60462176-60462201 | UCCUGGUAUUCUUAGCAGG | 850 |
| | | | | | UUAAAG | |
| 53335_4_298 | BCL11a | Exon 4 | + | chr2: 60462203-60462228 | GUUAUUGUCUGCAAUAUGA | 851 |
| | | | | | AUCCCA | |
| 53335_4_299 | BCL11a | Exon 4 | + | chr2: 60462208-60462233 | UGUCUGCAAUAUGAAUCCC | 852 |
| | | | | | AUGGAG | |
| 53335_4_300 | BCL11a | Exon 4 | + | chr2: 60462211-60462236 | CUGCAAUAUGAAUCCCAUG | 853 |
| | | | | | GAGAGG | |
| 53335_4_301 | BCL11a | Exon 4 | + | chr2: 60462215-60462240 | AAUAUGAAUCCCAUGGAGA | 854 |
| | | | | | GGUGGC | |
| 53335_4_302 | BCL11a | Exon 4 | + | chr2: 60462216-60462241 | AUAUGAAUCCCAUGGAGAG | 855 |
| | | | | | GUGGCU | |
| 53335_4_303 | BCL11a | Exon 4 | + | chr2: 60462220-60462245 | GAAUCCCAUGGAGAGGUGG | 856 |
| | | | | | CUGGGA | |
| 53335_4_304 | BCL11a | Exon 4 | + | chr2: 60462244-60462269 | AAGGACAUUCUGCACCUAG | 857 |
| | | | | | UCCUGA | |
| 53335_4_305 | BCL11a | Exon 4 | + | chr2: 60462245-60462270 | AGGACAUUCUGCACCUAGU | 858 |
| | | | | | CCUGAA | |
| 53335_4_306 | BCL11a | Exon 4 | + | chr2: 60462259-60462284 | CUAGUCCUGAAGGGAUACC | 859 |
| | | | | | AACCCG | |
| 53335_4_307 | BCL11a | Exon 4 | + | chr2: 60462260-60462285 | UAGUCCUGAAGGGAUACCA | 860 |
| | | | | | ACCCGC | |
| 53335_4_308 | BCL11a | Exon 4 | + | chr2: 60462261-60462286 | AGUCCUGAAGGGAUACCAA | 861 |
| | | | | | CCCGCG | |
| 53335_4_309 | BCL11a | Exon 4 | + | chr2: 60462266-60462291 | UGAAGGGAUACCAACCCGC | 862 |
| | | | | | GGGGUC | |
| 53335_4_310 | BCL11a | Exon 4 | + | chr2: 60462267-60462292 | GAAGGGAUACCAACCCGCG | 863 |
| | | | | | GGGUCA | |
| 53335_4_311 | BCL11a | Exon 4 | + | chr2: 60462268-60462293 | AAGGGAUACCAACCCGCGG | 864 |
| | | | | | GGUCAG | |
| 53335_4_312 | BCL11a | Exon 4 | + | chr2: 60462345-60462370 | GCGUGUUGCAAGAGAAACC | 865 |
| | | | | | AUGCAC | |
| 53335_4_313 | BCL11a | Exon 4 | + | chr2: 60462352-60462377 | GCAAGAGAAACCAUGCACU | 866 |
| | | | | | GGUGAA | |
| 53335_4_314 | BCL11a | Exon 4 | + | chr2: 60462384-60462409 | UUGCAAGUUGUACAUGUGU | 867 |
| | | | | | AGCUGC | |
| 53335_4_315 | BCL11a | Exon 4 | + | chr2: 60462385-60462410 | UGCAAGUUGUACAUGUGUA | 868 |
| | | | | | GCUGCU | |
| 53335_4_316 | BCL11a | Exon 4 | − | chr2: 60457269-60457294 | GGAAAAACCACUGUCUGUG | 869 |
| | | | | | UUUUUU | |
| 53335_4_317 | BCL11a | Exon 4 | − | chr2: 60457295-60457320 | GUUUCUGGUCUUUGUUAAG | 870 |
| | | | | | UUCUAU | |
| 53335_4_318 | BCL11a | Exon 4 | − | chr2: 60457315-60457340 | CCUGGCUUUUUAUUGUAUU | 871 |
| | | | | | UGUUUC | |
| 53335_4_319 | BCL11a | Exon 4 | − | chr2: 60457338-60457363 | AAGAUGACCAAAGGUCAUU | 872 |
| | | | | | ACAACC | |
| 53335_4_320 | BCL11a | Exon 4 | − | chr2: 60457352-60457377 | AAAAAAAAAAAUAAAAGAU | 873 |
| | | | | | GACCAA | |
| 53335_4_321 | BCL11a | Exon 4 | − | chr2: 60457415-60457440 | UGCUUAUGUGCCCUGUUCA | 874 |
| | | | | | AAACAG | |
| 53335_4_322 | BCL11a | Exon 4 | − | chr2: 60457459-60457484 | AACUUGAAAUUUUAUCUUU | 875 |
| | | | | | UACUAU | |
| 53335_4_323 | BCL11a | Exon 4 | − | chr2: 60457460-60457485 | UAACUUGAAAUUUUAUCUU | 876 |
| | | | | | UUACUA | |
| 53335_4_324 | BCL11a | Exon 4 | − | chr2: 60457522-60457547 | AUGGCAAUGCAGAAUAUUU | 877 |
| | | | | | UGUUAU | |
| 53335_4_325 | BCL11a | Exon 4 | − | chr2: 60457546-60457571 | GCUUUAGUCAAUACUUUUU | 878 |
| | | | | | UGUAAA | |
| 53335_4_326 | BCL11a | Exon 4 | − | chr2: 60457613-60457638 | ACUAAAUGGUGCUUUAUAU | 879 |
| | | | | | UUAGAU | |
| 53335_4_327 | BCL11a | Exon 4 | − | chr2: 60457632-60457657 | GUUUUUUUCAUUGCCAAAA | 880 |
| | | | | | ACUAAA | |
| 53335_4_328 | BCL11a | Exon 4 | − | chr2: 60457786-60457811 | AUGCAGUACUGCAAGCUAA | 881 |
| | | | | | UAACGU | |
| 53335_4_329 | BCL11a | Exon 4 | − | chr2: 60457858-60457883 | AAUGUCACAUGGAUGGCUG | 882 |
| | | | | | UCAUAG | |
| 53335_4_330 | BCL11a | Exon 4 | − | chr2: 60457859-60457884 | GAAUGUCACAUGGAUGGCU | 883 |
| | | | | | GUCAUA | |
| 53335_4_331 | BCL11a | Exon 4 | − | chr2: 60457860-60457885 | AGAAUGUCACAUGGAUGGC | 884 |
| | | | | | UGUCAU | |
| 53335_4_332 | BCL11a | Exon 4 | − | chr2: 60457870-60457895 | GGAGCCUGCUAGAAUGUCA | 885 |
| | | | | | CAUGGA | |
| 53335_4_333 | BCL11a | Exon 4 | − | chr2: 60457874-60457899 | UGGGGGAGCCUGCUAGAAU | 886 |
| | | | | | GUCACA | |
| 53335_4_334 | BCL11a | Exon 4 | − | chr2: 60457896-60457921 | GAGAAGCCAUAUAAUGGCG | 887 |
| | | | | | GUUUGG | |
| 53335_4_335 | BCL11a | Exon 4 | − | chr2: 60457897-60457922 | UGAGAAGCCAUAUAAUGGC | 888 |
| | | | | | GGUUUG | |
| 53335_4_336 | BCL11a | Exon 4 | − | chr2: 60457898-60457923 | AUGAGAAGCCAUAUAAUGG | 889 |
| | | | | | CGGUUU | |
| 53335_4_337 | BCL11a | Exon 4 | − | chr2: 60457899-60457924 | GAUGAGAAGCCAUAUAAUG | 890 |
| | | | | | GCGGUU | |
| 53335_4_338 | BCL11a | Exon 4 | − | chr2: 60457904-60457929 | UUACAGAUGAGAAGCCAUA | 891 |
| | | | | | UAAUGG | |
| 53335_4_339 | BCL11a | Exon 4 | − | chr2: 60457907-60457932 | ACAUUACAGAUGAGAAGCC | 892 |
| | | | | | AUAUAA | |
| 53335_4_340 | BCL11a | Exon 4 | − | chr2: 60457999-60458024 | CCACAGUAUAUUUUUUUAA | 893 |
| | | | | | UUUGGC | |
| 53335_4_341 | BCL11a | Exon 4 | − | chr2: 60458003-60458028 | GCUGCCACAGUAUAUUUUU | 894 |
| | | | | | UUAAUU | |
| 53335_4_342 | BCL11a | Exon 4 | − | chr2: 60458030-60458055 | UUUUGGUAGUGGAAAAAAA | 895 |
| | | | | | AAAGAC | |
| 53335_4_343 | BCL11a | Exon 4 | − | chr2: 60458046-60458071 | GGUAUCAAUGUACCUUUUU | 896 |
| | | | | | UGGUAG | |
| 53335_4_344 | BCL11a | Exon 4 | − | chr2: 60458052-60458077 | UUAAAAGGUAUCAAUGUAC | 897 |
| | | | | | CUUUUU | |
| 53335_4_345 | BCL11a | Exon 4 | − | chr2: 60458072-60458097 | UUUAACUGUUGCUUGUUCU | 898 |
| | | | | | CUUAAA | |
| 53335_4_346 | BCL11a | Exon 4 | − | chr2: 60458130-60458155 | UUGAAUUAAAUGUUCAUCU | 899 |
| | | | | | AGUGUU | |
| 53335_4_347 | BCL11a | Exon 4 | − | chr2: 60458161-60458186 | UGGUCUUUUUUCUGUAUUU | 900 |
| | | | | | CUAGAA | |
| 53335_4_348 | BCL11a | Exon 4 | − | chr2: 60458186-60458211 | UGAUUCCUAUGCUAAAAUA | 901 |
| | | | | | CAUUUA | |
| 53335_4_349 | BCL11a | Exon 4 | − | chr2: 60458231-60458256 | UUAAGAUUAUAUAGUACUU | 902 |
| | | | | | AAAUAU | |
| 53335_4_350 | BCL11a | Exon 4 | − | chr2: 60458260-60458285 | AAAAAAAAAAACAUACAUU | 903 |
| | | | | | GGGGAA | |
| 53335_4_351 | BCL11a | Exon 4 | − | chr2: 60458265-60458290 | UUGUAAAAAAAAAAAACAU | 904 |
| | | | | | ACAUUG | |
| 53335_4_352 | BCL11a | Exon 4 | − | chr2: 60458266-60458291 | GUUGUAAAAAAAAAAAACA | 905 |
| | | | | | UACAUU | |
| 53335_4_353 | BCL11a | Exon 4 | − | chr2: 60458267-60458292 | GGUUGUAAAAAAAAAAAAC | 906 |
| | | | | | AUACAU | |
| 53335_4_354 | BCL11a | Exon 4 | − | chr2: 60458293-60458318 | AUGCCUUGGAUACACACCG | 907 |
| | | | | | CUCUUC | |
| 53335_4_355 | BCL11a | Exon 4 | − | chr2: 60458312-60458337 | AAAUGGUAGUGGAAAUUCU | 908 |
| | | | | | AUGCCU | |
| 53335_4_356 | BCL11a | Exon 4 | − | chr2: 60458328-60458353 | CUUGUUAUCCAUUUAAAAA | 909 |
| | | | | | UGGUAG | |
| 53335_4_357 | BCL11a | Exon 4 | − | chr2: 60458334-60458359 | ACAAGACUUGUUAUCCAUU | 910 |
| | | | | | UAAAAA | |
| 53335_4_358 | BCL11a | Exon 4 | − | chr2: 60458366-60458391 | GCAUUUUAGGGUUCCAUUG | 911 |
| | | | | | UCUUGG | |
| 53335_4_359 | BCL11a | Exon 4 | − | chr2: 60458369-60458394 | ACUGCAUUUUAGGGUUCCA | 912 |
| | | | | | UUGUCU | |
| 53335_4_360 | BCL11a | Exon 4 | − | chr2: 60458383-60458408 | AUGUUUAGGGGGGAACUGC | 913 |
| | | | | | AUUUUA | |
| 53335_4_361 | BCL11a | Exon 4 | − | chr2: 60458384-60458409 | UAUGUUUAGGGGGGAACUG | 914 |
| | | | | | CAUUUU | |
| 53335_4_362 | BCL11a | Exon 4 | − | chr2: 60458398-60458423 | AAAAAACACUUCAUUAUGU | 915 |
| | | | | | UUAGGG | |
| 53335_4_363 | BCL11a | Exon 4 | − | chr2: 60458399-60458424 | UAAAAAACACUUCAUUAUG | 916 |
| | | | | | UUUAGG | |
| 53335_4_364 | BCL11a | Exon 4 | − | chr2: 60458400-60458425 | UUAAAAAACACUUCAUUAU | 917 |
| | | | | | GUUUAG | |
| 53335_4_365 | BCL11a | Exon 4 | − | chr2: 60458401-60458426 | UUUAAAAAACACUUCAUUA | 918 |
| | | | | | UGUUUA | |
| 53335_4_366 | BCL11a | Exon 4 | − | chr2: 60458402-60458427 | UUUUAAAAAACACUUCAUU | 919 |
| | | | | | AUGUUU | |
| 53335_4_367 | BCL11a | Exon 4 | − | chr2: 60458478-60458503 | UGAUUGCUUUCGCUUCUAC | 920 |
| | | | | | AGUGCA | |
| 53335_4_368 | BCL11a | Exon 4 | − | chr2: 60458535-60458560 | GACGCAACAUUGCAAGCGC | 921 |
| | | | | | UGUGAA | |
| 53335_4_369 | BCL11a | Exon 4 | − | chr2: 60458562-60458587 | UACUUGACUAUUGAGCUUA | 922 |
| | | | | | CUUACU | |
| 53335_4_370 | BCL11a | Exon 4 | − | chr2: 60458634-60458659 | AAAAAAAUUGAACACAAUC | 923 |
| | | | | | UCAUUG | |
| 53335_4_371 | BCL11a | Exon 4 | − | chr2: 60458682-60458707 | UCCCAGUUUACAGGUCUAU | 924 |
| | | | | | ACUUAA | |
| 53335_4_372 | BCL11a | Exon 4 | − | chr2: 60458683-60458708 | UUCCCAGUUUACAGGUCUA | 925 |
| | | | | | UACUUA | |
| 53335_4_373 | BCL11a | Exon 4 | − | chr2: 60458696-60458721 | GCACUGUACAAUUUUCCCA | 926 |
| | | | | | GUUUAC | |
| 53335_4_374 | BCL11a | Exon 4 | − | chr2: 60458734-60458759 | GAGUAUAAAAUAAACCUGC | 927 |
| | | | | | UCAGAU | |
| 53335_4_375 | BCL11a | Exon 4 | − | chr2: 60458764-60458789 | AUCUUUUCUCUAAUCAGAG | 928 |
| | | | | | AUACAG | |
| 53335_4_376 | BCL11a | Exon 4 | − | chr2: 60458829-60458854 | AAUAAAAGCUAGCAUCUGC | 929 |
| | | | | | CCCAGU | |
| 53335_4_377 | BCL11a | Exon 4 | − | chr2: 60458897-60458922 | UGUGCUAUUUGUGUUAACA | 930 |
| | | | | | UGGAAG | |
| 53335_4_378 | BCL11a | Exon 4 | − | chr2: 60458903-60458928 | ACACUGUGUGCUAUUUGUG | 931 |
| | | | | | UUAACA | |
| 53335_4_379 | BCL11a | Exon 4 | − | chr2: 60459085-60459110 | ACUAUUUGCCAUUUAAAAC | 932 |
| | | | | | UAGAAC | |
| 53335_4_380 | BCL11a | Exon 4 | − | chr2: 60459114-60459139 | AAUAAUAUGAUUUAUUAGC | 933 |
| | | | | | ACAACG | |
| 53335_4_381 | BCL11a | Exon 4 | − | chr2: 60459152-60459177 | AGGCUGACAAUAAGGUUUG | 934 |
| | | | | | ACAGAG | |
| 53335_4_382 | BCL11a | Exon 4 | − | chr2: 60459153-60459178 | GAGGCUGACAAUAAGGUUU | 935 |
| | | | | | GACAGA | |
| 53335_4_383 | BCL11a | Exon 4 | − | chr2: 60459154-60459179 | AGAGGCUGACAAUAAGGUU | 936 |
| | | | | | UGACAG | |
| 53335_4_384 | BCL11a | Exon 4 | − | chr2: 60459165-60459190 | UAUUGAAAGGAAGAGGCUG | 937 |
| | | | | | ACAAUA | |
| 53335_4_385 | BCL11a | Exon 4 | − | chr2: 60459177-60459202 | CCUUGUAUACCAUAUUGAA | 938 |
| | | | | | AGGAAG | |
| 53335_4_386 | BCL11a | Exon 4 | − | chr2: 60459183-60459208 | UUAAGACCUUGUAUACCAU | 939 |
| | | | | | AUUGAA | |
| 53335_4_387 | BCL11a | Exon 4 | − | chr2: 60459229-60459254 | GAUCCAGAUCUACUUGGUU | 940 |
| | | | | | GUCAAG | |
| 53335_4_388 | BCL11a | Exon 4 | − | chr2: 60459240-60459265 | CAAAAGAAAUAGAUCCAGA | 941 |
| | | | | | UCUACU | |
| 53335_4_389 | BCL11a | Exon 4 | − | chr2: 60459271-60459296 | UUUAAUAAUGUCUUUUUAA | 942 |
| | | | | | AAAUAC | |
| 53335_4_390 | BCL11a | Exon 4 | − | chr2: 60459323-60459348 | UGGAACGCAAUUAAAUACA | 943 |
| | | | | | CUAGUA | |
| 53335_4_391 | BCL11a | Exon 4 | − | chr2: 60459348-60459373 | UUGAAUGUGUAAUGUGCAA | 944 |
| | | | | | AAGCCC | |
| 53335_4_392 | BCL11a | Exon 4 | − | chr2: 60459418-60459443 | CUCCUGGUGAGAGCUUAAA | 945 |
| | | | | | AGAAAU | |
| 53335_4_393 | BCL11a | Exon 4 | − | chr2: 60459419-60459444 | GCUCCUGGUGAGAGCUUAA | 946 |
| | | | | | AAGAAA | |
| 53335_4_394 | BCL11a | Exon 4 | − | chr2: 60459439-60459464 | ACCAGUAUAAAAGCUACUU | 947 |
| | | | | | UGCUCC | |
| 53335_4_395 | BCL11a | Exon 4 | − | chr2: 60459547-60459572 | UUCUAUAUUGUAUUUCUCA | 948 |
| | | | | | CAACAA | |
| 53335_4_396 | BCL11a | Exon 4 | − | chr2: 60459588-60459613 | AGCAUUGGGUGAGGUAAUA | 949 |
| | | | | | AACCUU | |
| 53335_4_397 | BCL11a | Exon 4 | − | chr2: 60459602-60459627 | UUGUAGCUUAAUUCAGCAU | 950 |
| | | | | | UGGGUG | |
| 53335_4_398 | BCL11a | Exon 4 | − | chr2: 60459607-60459632 | UAAACUUGUAGCUUAAUUC | 951 |
| | | | | | AGCAUU | |
| 53335_4_399 | BCL11a | Exon 4 | − | chr2: 60459608-60459633 | AUAAACUUGUAGCUUAAUU | 952 |
| | | | | | CAGCAU | |
| 53335_4_400 | BCL11a | Exon 4 | − | chr2: 60459651-60459676 | CUUGGAUCUAUUAAAACCA | 953 |
| | | | | | CAUCGA | |
| 53335_4_401 | BCL11a | Exon 4 | − | chr2: 60459674-60459699 | AUUUGGUUUUAAAAUAUGA | 954 |
| | | | | | GUGCCU | |
| 53335_4_402 | BCL11a | Exon 4 | − | chr2: 60459696-60459721 | AACAGAACAAGUUUAUUCU | 955 |
| | | | | | AUCAUU | |
| 53335_4_403 | BCL11a | Exon 4 | − | chr2: 60459749-60459774 | UGUAUCAAUUGGAAAGGAA | 956 |
| | | | | | GAAAAA | |
| 53335_4_404 | BCL11a | Exon 4 | − | chr2: 60459760-60459785 | AAAGGGUUAAAUGUAUCAA | 957 |
| | | | | | UUGGAA | |
| 53335_4_405 | BCL11a | Exon 4 | − | chr2: 60459765-60459790 | UCUCUAAAGGGUUAAAUGU | 958 |
| | | | | | AUCAAU | |
| 53335_4_406 | BCL11a | Exon 4 | − | chr2: 60459782-60459807 | UAUGAGCUAAAUGUCUGUC | 959 |
| | | | | | UCUAAA | |
| 53335_4_407 | BCL11a | Exon 4 | − | chr2: 60459783-60459808 | CUAUGAGCUAAAUGUCUGU | 960 |
| | | | | | CUCUAA | |
| 53335_4_408 | BCL11a | Exon 4 | − | chr2: 60459855-60459880 | UAACGUGAGGAGGAAAAAC | 961 |
| | | | | | AGUCUU | |
| 53335_4_409 | BCL11a | Exon 4 | − | chr2: 60459870-60459895 | UACAGUUUUAUUUUAUAAC | 962 |
| | | | | | GUGAGG | |
| 53335_4_410 | BCL11a | Exon 4 | − | chr2: 60459873-60459898 | AUGUACAGUUUUAUUUUAU | 963 |
| | | | | | AACGUG | |
| 53335_4_411 | BCL11a | Exon 4 | − | chr2: 60460023-60460048 | CUUAGACAGCAUGUAUGGU | 964 |
| | | | | | AUGUUA | |
| 53335_4_412 | BCL11a | Exon 4 | − | chr2: 60460033-60460058 | UUUUUUUAAACUUAGACAG | 965 |
| | | | | | CAUGUA | |
| 53335_4_413 | BCL11a | Exon 4 | − | chr2: 60460130-60460155 | ACCGUUUGAAUGCAUGAUC | 966 |
| | | | | | UGUAUG | |
| 53335_4_414 | BCL11a | Exon 4 | − | chr2: 60460131-60460156 | CACCGUUUGAAUGCAUGAU | 967 |
| | | | | | CUGUAU | |
| 53335_4_415 | BCL11a | Exon 4 | − | chr2: 60460132-60460157 | UCACCGUUUGAAUGCAUGA | 968 |
| | | | | | UCUGUA | |
| 53335_4_416 | BCL11a | Exon 4 | − | chr2: 60460314-60460339 | AUCGCCCUCCAGCCCCACUC | 969 |
| | | | | | CCUGU | |
| 53335_4_417 | BCL11a | Exon 4 | − | chr2: 60460403-60460428 | GAAUAAUGAUAUAAAAACU | 970 |
| | | | | | GAAUAG | |
| 53335_4_418 | BCL11a | Exon 4 | − | chr2: 60460448-60460473 | UACCCUGGAGAAACACAUG | 971 |
| | | | | | AAAAAA | |
| 53335_4_419 | BCL11a | Exon 4 | − | chr2: 60460468-60460493 | AUGCCUUUUAGCGUGUACA | 972 |
| | | | | | GUACCC | |
| 53335_4_420 | BCL11a | Exon 4 | − | chr2: 60460522-60460547 | AUGAAAACGCAUGGCCAGG | 973 |
| | | | | | UGGGGA | |
| 53335_4_421 | BCL11a | Exon 4 | − | chr2: 60460526-60460551 | GCACAUGAAAACGCAUGGC | 974 |
| | | | | | CAGGUG | |
| 53335_4_422 | BCL11a | Exon 4 | − | chr2: 60460527-60460552 | GGCACAUGAAAACGCAUGG | 975 |
| | | | | | CCAGGU | |
| 53335_4_423 | BCL11a | Exon 4 | − | chr2: 60460528-60460553 | AGGCACAUGAAAACGCAUG | 976 |
| | | | | | GCCAGG | |
| 53335_4_424 | BCL11a | Exon 4 | − | chr2: 60460531-60460556 | ACCAGGCACAUGAAAACGC | 977 |
| | | | | | AUGGCC | |
| 53335_4_425 | BCL11a | Exon 4 | − | chr2: 60460536-60460561 | AGCUCACCAGGCACAUGAA | 978 |
| | | | | | AACGCA | |
| 53335_4_426 | BCL11a | Exon 4 | − | chr2: 60460553-60460578 | CUGUGCCCAGAGUAGCAAG | 979 |
| | | | | | CUCACC | |
| 53335_4_427 | BCL11a | Exon 4 | − | chr2: 60460610-60460635 | CCACAGGAGAAGCCACACG | 980 |
| | | | | | GGCGAA | |
| 53335_4_428 | BCL11a | Exon 4 | − | chr2: 60460617-60460642 | UCACUGUCCACAGGAGAAG | 981 |
| | | | | | CCACAC | |
| 53335_4_429 | BCL11a | Exon 4 | − | chr2: 60460618-60460643 | CUCACUGUCCACAGGAGAA | 982 |
| | | | | | GCCACA | |
| 53335_4_430 | BCL11a | Exon 4 | − | chr2: 60460631-60460656 | GAACUGUAGCAAUCUCACU | 983 |
| | | | | | GUCCAC | |
| 53335_4_431 | BCL11a | Exon 4 | − | chr2: 60460670-60460695 | ACGCAGCGACACUUGUGAG | 984 |
| | | | | | UACUGU | |
| 53335_4_432 | BCL11a | Exon 4 | − | chr2: 60460671-60460696 | GACGCAGCGACACUUGUGA | 985 |
| | | | | | GUACUG | |
| 53335_4_433 | BCL11a | Exon 4 | − | chr2: 60460701-60460726 | GCCCGGGCAGGCCCAGCUC | 986 |
| | | | | | AAAAGA | |
| 53335_4_434 | BCL11a | Exon 4 | − | chr2: 60460702-60460727 | GGCCCGGGCAGGCCCAGCU | 987 |
| | | | | | CAAAAG | |
| 53335_4_435 | BCL11a | Exon 4 | − | chr2: 60460718-60460743 | CCAUAUUAGUGGUCCGGGC | 988 |
| | | | | | CCGGGC | |
| 53335_4_436 | BCL11a | Exon 4 | − | chr2: 60460722-60460747 | CGCCCCAUAUUAGUGGUCC | 989 |
| | | | | | GGGCCC | |
| 53335_4_437 | BCL11a | Exon 4 | − | chr2: 60460723-60460748 | ACGCCCCAUAUUAGUGGUC | 990 |
| | | | | | CGGGCC | |
| 53335_4_438 | BCL11a | Exon 4 | − | chr2: 60460728-60460753 | GGAGCACGCCCCAUAUUAG | 991 |
| | | | | | UGGUCC | |
| 53335_4_439 | BCL11a | Exon 4 | − | chr2: 60460729-60460754 | GGGAGCACGCCCCAUAUUA | 992 |
| | | | | | GUGGUC | |
| 53335_4_440 | BCL11a | Exon 4 | − | chr2: 60460734-60460759 | GUGGAGGGAGCACGCCCCA | 993 |
| | | | | | UAUUAG | |
| 53335_4_441 | BCL11a | Exon 4 | − | chr2: 60460754-60460779 | GGGGCGCAGCGGCACGGGA | 994 |
| | | | | | AGUGGA | |
| 53335_4_442 | BCL11a | Exon 4 | − | chr2: 60460755-60460780 | CGGGGCGCAGCGGCACGGG | 995 |
| | | | | | AAGUGG | |
| 53335_4_443 | BCL11a | Exon 4 | − | chr2: 60460758-60460783 | UCUCGGGGCGCAGCGGCAC | 996 |
| | | | | | GGGAAG | |
| 53335_4_444 | BCL11a | Exon 4 | − | chr2: 60460764-60460789 | GAGGGAUCUCGGGGCGCAG | 997 |
| | | | | | CGGCAC | |
| 53335_4_445 | BCL11a | Exon 4 | − | chr2: 60460765-60460790 | GGAGGGAUCUCGGGGCGCA | 998 |
| | | | | | GCGGCA | |
| 53335_4_446 | BCL11a | Exon 4 | − | chr2: 60460770-60460795 | UGGACGGAGGGAUCUCGGG | 999 |
| | | | | | GCGCAG | |
| 53335_4_447 | BCL11a | Exon 4 | − | chr2: 60460778-60460803 | CGGGGAGCUGGACGGAGGG | 1000 |
| | | | | | AUCUCG | |
| 53335_4_448 | BCL11a | Exon 4 | − | chr2: 60460779-60460804 | CCGGGGAGCUGGACGGAGG | 1001 |
| | | | | | GAUCUC | |
| 53335_4_449 | BCL11a | Exon 4 | − | chr2: 60460780-60460805 | CCCGGGGAGCUGGACGGAG | 1002 |
| | | | | | GGAUCU | |
| 53335_4_450 | BCL11a | Exon 4 | − | chr2: 60460787-60460812 | CACACCGCCCGGGGAGCUG | 1003 |
| | | | | | GACGGA | |
| 53335_4_451 | BCL11a | Exon 4 | − | chr2: 60460788-60460813 | CCACACCGCCCGGGGAGCU | 1004 |
| | | | | | GGACGG | |
| 53335_4_452 | BCL11a | Exon 4 | − | chr2: 60460791-60460816 | UCUCCACACCGCCCGGGGA | 1005 |
| | | | | | GCUGGA | |
| 53335_4_453 | BCL11a | Exon 4 | − | chr2: 60460795-60460820 | CGCUUCUCCACACCGCCCG | 1006 |
| | | | | | GGGAGC | |
| 53335_4_454 | BCL11a | Exon 4 | − | chr2: 60460801-60460826 | AGUUUGCGCUUCUCCACAC | 1007 |
| | | | | | CGCCCG | |
| 53335_4_455 | BCL11a | Exon 4 | − | chr2: 60460802-60460827 | GAGUUUGCGCUUCUCCACA | 1008 |
| | | | | | CCGCCC | |
| 53335_4_456 | BCL11a | Exon 4 | − | chr2: 60460803-60460828 | GGAGUUUGCGCUUCUCCAC | 1009 |
| | | | | | ACCGCC | |
| 53335_4_457 | BCL11a | Exon 4 | − | chr2: 60460829-60460854 | CUCGUCGGAGCACUCCUCG | 1010 |
| | | | | | GAGAAC | |
| 53335_4_458 | BCL11a | Exon 4 | − | chr2: 60460830-60460855 | CCUCGUCGGAGCACUCCUC | 1011 |
| | | | | | GGAGAA | |
| 53335_4_459 | BCL11a | Exon 4 | − | chr2: 60460837-60460862 | UUUGCCUCCUCGUCGGAGC | 1012 |
| | | | | | ACUCCU | |
| 53335_4_460 | BCL11a | Exon 4 | − | chr2: 60460849-60460874 | AGACAAUCGCCUUUUGCCU | 1013 |
| | | | | | CCUCGU | |
| 53335_4_461 | BCL11a | Exon 4 | − | chr2: 60460884-60460909 | AGCUCAAAGAUCCCUUCCU | 1014 |
| | | | | | UAGCUU | |
| 53335_4_462 | BCL11a | Exon 4 | − | chr2: 60460913-60460938 | GUGGCUCGCCGGCUACGCG | 1015 |
| | | | | | GCCUCC | |
| 53335_4_463 | BCL11a | Exon 4 | − | chr2: 60460921-60460946 | UACUCGCAGUGGCUCGCCG | 1016 |
| | | | | | GCUACG | |
| 53335_4_464 | BCL11a | Exon 4 | − | chr2: 60460929-60460954 | AGAACGUGUACUCGCAGUG | 1017 |
| | | | | | GCUCGC | |
| 53335_4_465 | BCL11a | Exon 4 | − | chr2: 60460937-60460962 | CAACACGGAGAACGUGUAC | 1018 |
| | | | | | UCGCAG | |
| 53335_4_466 | BCL11a | Exon 4 | − | chr2: 60460957-60460982 | CUGCCCCCGGCCGCGAUGC | 1019 |
| | | | | | CCAACA | |
| 53335_4_467 | BCL11a | Exon 4 | − | chr2: 60460975-60461000 | CUCGAGAAGGAGUUCGACC | 1020 |
| | | | | | UGCCCC | |
| 53335_4_468 | BCL11a | Exon 4 | − | chr2: 60460993-60461018 | UUCUCUAAGCGCAUCAAGC | 1021 |
| | | | | | UCGAGA | |
| 53335_4_469 | BCL11a | Exon 4 | − | chr2: 60461043-60461068 | GGGGCCUGUCCAAAAAGCU | 1022 |
| | | | | | GCUGCU | |
| 53335_4_470 | BCL11a | Exon 4 | − | chr2: 60461044-60461069 | GGGGGCCUGUCCAAAAAGC | 1023 |
| | | | | | UGCUGC | |
| 53335_4_471 | BCL11a | Exon 4 | − | chr2: 60461067-60461092 | GCUCCCCGGGCGAGUCGGC | 1024 |
| | | | | | CUCGGG | |
| 53335_4_472 | BCL11a | Exon 4 | − | chr2: 60461068-60461093 | UGCUCCCCGGGCGAGUCGG | 1025 |
| | | | | | CCUCGG | |
| 53335_4_473 | BCL11a | Exon 4 | − | chr2: 60461069-60461094 | CUGCUCCCCGGGCGAGUCG | 1026 |
| | | | | | GCCUCG | |
| 53335_4_474 | BCL11a | Exon 4 | − | chr2: 60461070-60461095 | GCUGCUCCCCGGGCGAGUC | 1027 |
| | | | | | GGCCUC | |
| 53335_4_475 | BCL11a | Exon 4 | − | chr2: 60461071-60461096 | GGCUGCUCCCCGGGCGAGU | 1028 |
| | | | | | CGGCCU | |
| 53335_4_476 | BCL11a | Exon 4 | − | chr2: 60461077-60461102 | GGCCGCGGCUGCUCCCCGG | 1029 |
| | | | | | GCGAGU | |
| 53335_4_477 | BCL11a | Exon 4 | − | chr2: 60461085-60461110 | CUGUUAAUGGCCGCGGCUG | 1030 |
| | | | | | CUCCCC | |
| 53335_4_478 | BCL11a | Exon 4 | − | chr2: 60461086-60461111 | ACUGUUAAUGGCCGCGGCU | 1031 |
| | | | | | GCUCCC | |
| 53335_4_479 | BCL11a | Exon 4 | − | chr2: 60461097-60461122 | UAGACGAUGGCACUGUUAA | 1032 |
| | | | | | UGGCCG | |
| 53335_4_480 | BCL11a | Exon 4 | − | chr2: 60461103-60461128 | ACCGCAUAGACGAUGGCAC | 1033 |
| | | | | | UGUUAA | |
| 53335_4_481 | BCL11a | Exon 4 | − | chr2: 60461115-60461140 | CCGGCGAGUCGGACCGCAU | 1034 |
| | | | | | AGACGA | |
| 53335_4_482 | BCL11a | Exon 4 | − | chr2: 60461131-60461156 | GACGAAGACUCGGUGGCCG | 1035 |
| | | | | | GCGAGU | |
| 53335_4_483 | BCL11a | Exon 4 | − | chr2: 60461139-60461164 | ACACUUGCGACGAAGACUC | 1036 |
| | | | | | GGUGGC | |
| 53335_4_484 | BCL11a | Exon 4 | − | chr2: 60461143-60461168 | AGGGACACUUGCGACGAAG | 1037 |
| | | | | | ACUCGG | |
| 53335_4_485 | BCL11a | Exon 4 | − | chr2: 60461146-60461171 | CACAGGGACACUUGCGACG | 1038 |
| | | | | | AAGACU | |
| 53335_4_486 | BCL11a | Exon 4 | − | chr2: 60461167-60461192 | CACCUGGCCGAGGCCGAGG | 1039 |
| | | | | | GCCACA | |
| 53335_4_487 | BCL11a | Exon 4 | − | chr2: 60461168-60461193 | CCACCUGGCCGAGGCCGAG | 1040 |
| | | | | | GGCCAC | |
| 53335_4_488 | BCL11a | Exon 4 | − | chr2: 60461175-60461200 | AGCGCGGCCACCUGGCCGA | 1041 |
| | | | | | GGCCGA | |
| 53335_4_489 | BCL11a | Exon 4 | − | chr2: 60461176-60461201 | AAGCGCGGCCACCUGGCCG | 1042 |
| | | | | | AGGCCG | |
| 53335_4_490 | BCL11a | Exon 4 | − | chr2: 60461182-60461207 | AAGCAUAAGCGCGGCCACC | 1043 |
| | | | | | UGGCCG | |
| 53335_4_491 | BCL11a | Exon 4 | − | chr2: 60461188-60461213 | GGCGAGAAGCAUAAGCGCG | 1044 |
| | | | | | GCCACC | |
| 53335_4_492 | BCL11a | Exon 4 | − | chr2: 60461196-60461221 | AGGUCCUGGGCGAGAAGCA | 1045 |
| | | | | | UAAGCG | |
| 53335_4_493 | BCL11a | Exon 4 | − | chr2: 60461214-60461239 | UCAGCGAGGCCUUCCACCA | 1046 |
| | | | | | GGUCCU | |
| 53335_4_494 | BCL11a | Exon 4 | − | chr2: 60461215-60461240 | UUCAGCGAGGCCUUCCACC | 1047 |
| | | | | | AGGUCC | |
| 53335_4_495 | BCL11a | Exon 4 | − | chr2: 60461221-60461246 | CAGCACUUCAGCGAGGCCU | 1048 |
| | | | | | UCCACC | |
| 53335_4_496 | BCL11a | Exon 4 | − | chr2: 60461233-60461258 | CUCAGCUCCAUGCAGCACU | 1049 |
| | | | | | UCAGCG | |
| 53335_4_497 | BCL11a | Exon 4 | − | chr2: 60461263-60461288 | GCCCUGCCCGACGUCAUGC | 1050 |
| | | | | | AGGGCA | |
| 53335_4_498 | BCL11a | Exon 4 | − | chr2: 60461268-60461293 | GCCGCGCCCUGCCCGACGU | 1051 |
| | | | | | CAUGCA | |
| 53335_4_499 | BCL11a | Exon 4 | − | chr2: 60461269-60461294 | AGCCGCGCCCUGCCCGACG | 1052 |
| | | | | | UCAUGC | |
| 53335_4_500 | BCL11a | Exon 4 | − | chr2: 60461304-60461329 | GCUCGCGGGGCGCGGUCGU | 1053 |
| | | | | | GGGCGU | |
| 53335_4_501 | BCL11a | Exon 4 | − | chr2: 60461305-60461330 | AGCUCGCGGGGCGCGGUCG | 1054 |
| | | | | | UGGGCG | |
| 53335_4_502 | BCL11a | Exon 4 | − | chr2: 60461310-60461335 | AGAACAGCUCGCGGGGCGC | 1055 |
| | | | | | GGUCGU | |
| 53335_4_503 | BCL11a | Exon 4 | − | chr2: 60461311-60461336 | GAGAACAGCUCGCGGGGCG | 1056 |
| | | | | | CGGUCG | |
| 53335_4_504 | BCL11a | Exon 4 | − | chr2: 60461317-60461342 | CACCACGAGAACAGCUCGC | 1057 |
| | | | | | GGGGCG | |
| 53335_4_505 | BCL11a | Exon 4 | − | chr2: 60461322-60461347 | CGCGCCACCACGAGAACAG | 1058 |
| | | | | | CUCGCG | |
| 53335_4_506 | BCL11a | Exon 4 | − | chr2: 60461323-60461348 | GCGCGCCACCACGAGAACA | 1059 |
| | | | | | GCUCGC | |
| 53335_4_507 | BCL11a | Exon 4 | − | chr2: 60461324-60461349 | GGCGCGCCACCACGAGAAC | 1060 |
| | | | | | AGCUCG | |
| 53335_4_508 | BCL11a | Exon 4 | − | chr2: 60461350-60461375 | UACGGCUUCGGGCUGAGCC | 1061 |
| | | | | | UGGAGG | |
| 53335_4_509 | BCL11a | Exon 4 | − | chr2: 60461353-60461378 | GACUACGGCUUCGGGCUGA | 1062 |
| | | | | | GCCUGG | |
| 53335_4_510 | BCL11a | Exon 4 | − | chr2: 60461356-60461381 | CUGGACUACGGCUUCGGGC | 1063 |
| | | | | | UGAGCC | |
| 53335_4_511 | BCL11a | Exon 4 | − | chr2: 60461366-60461391 | CUCGCUCUCCCUGGACUAC | 1064 |
| | | | | | GGCUUC | |
| 53335_4_512 | BCL11a | Exon 4 | − | chr2: 60461367-60461392 | UCUCGCUCUCCCUGGACUA | 1065 |
| | | | | | CGGCUU | |
| 53335_4_513 | BCL11a | Exon 4 | − | chr2: 60461373-60461398 | ACUGCCUCUCGCUCUCCCU | 1066 |
| | | | | | GGACUA | |
| 53335_4_514 | BCL11a | Exon 4 | − | chr2: 60461380-60461405 | CUCCUCGACUGCCUCUCGC | 1067 |
| | | | | | UCUCCC | |
| 53335_4_515 | BCL11a | Exon 4 | − | chr2: 60461512-60461537 | GCCAGCAGCGCGCUCAAGU | 1068 |
| | | | | | CCGUGG | |
| 53335_4_516 | BCL11a | Exon 4 | − | chr2: 60461515-60461540 | AGCGCCAGCAGCGCGCUCA | 1069 |
| | | | | | AGUCCG | |
| 53335_4_517 | BCL11a | Exon 4 | − | chr2: 60461544-60461569 | CGGAACCCGGCACCAGCGA | 1070 |
| | | | | | CUUGGU | |
| 53335_4_518 | BCL11a | Exon 4 | − | chr2: 60461545-60461570 | CCGGAACCCGGCACCAGCG | 1071 |
| | | | | | ACUUGG | |
| 53335_4_519 | BCL11a | Exon 4 | − | chr2: 60461548-60461573 | UCCCCGGAACCCGGCACCA | 1072 |
| | | | | | GCGACU | |
| 53335_4_520 | BCL11a | Exon 4 | − | chr2: 60461562-60461587 | UCUCCACCGCCAGCUCCCCG | 1073 |
| | | | | | GAACC | |
| 53335_4_521 | BCL11a | Exon 4 | − | chr2: 60461569-60461594 | GACGGUCUCUCCACCGCCA | 1074 |
| | | | | | GCUCCC | |
| 53335_4_522 | BCL11a | Exon 4 | − | chr2: 60461592-60461617 | CCCCCAUGACGGUCAAGUC | 1075 |
| | | | | | CGACGA | |
| 53335_4_523 | BCL11a | Exon 4 | − | chr2: 60461608-60461633 | CACAUGCACAAAUCGUCCC | 1076 |
| | | | | | CCAUGA | |
| 53335_4_524 | BCL11a | Exon 4 | − | chr2: 60461665-60461690 | AACCUGUGCGACCACGCGU | 1077 |
| | | | | | GCACCC | |
| 53335_4_525 | BCL11a | Exon 4 | − | chr2: 60461712-60461737 | UGGUGGUGCACCGGCGCAG | 1078 |
| | | | | | CCACAC | |
| 53335_4_526 | BCL11a | Exon 4 | − | chr2: 60461713-60461738 | CUGGUGGUGCACCGGCGCA | 1079 |
| | | | | | GCCACA | |
| 53335_4_527 | BCL11a | Exon 4 | − | chr2: 60461726-60461751 | AUUUCAGAGCAACCUGGUG | 1080 |
| | | | | | GUGCAC | |
| 53335_4_528 | BCL11a | Exon 4 | − | chr2: 60461734-60461759 | ACGUUCAAAUUUCAGAGCA | 1081 |
| | | | | | ACCUGG | |
| 53335_4_529 | BCL11a | Exon 4 | − | chr2: 60461737-60461762 | AAGACGUUCAAAUUUCAGA | 1082 |
| | | | | | GCAACC | |
| 53335_4_530 | BCL11a | Exon 4 | − | chr2: 60461766-60461791 | UCAAGUCCAAGUCAUGCGA | 1083 |
| | | | | | GUUCUG | |
| 53335_4_531 | BCL11a | Exon 4 | − | chr2: 60461794-60461819 | UCCGCCCCUCCUCCCUCCCA | 1084 |
| | | | | | GCCCC | |
| 53335_4_532 | BCL11a | Exon 4 | − | chr2: 60461848-60461873 | CAGCCAGGUAGCAAGCCGC | 1085 |
| | | | | | CCUUCC | |
| 53335_4_533 | BCL11a | Exon 4 | − | chr2: 60461868-60461893 | AAAGGUUACUGCAACCAUU | 1086 |
| | | | | | CCAGCC | |
| 53335_4_534 | BCL11a | Exon 4 | − | chr2: 60461891-60461916 | CCCAGGCCGGCCCAGCCCU | 1087 |
| | | | | | AUGCAA | |
| 53335_4_535 | BCL11a | Exon 4 | − | chr2: 60461909-60461934 | GUCUAGCCCACCGCUGUCC | 1088 |
| | | | | | CCAGGC | |
| 53335_4_536 | BCL11a | Exon 4 | − | chr2: 60461913-60461938 | ACACGUCUAGCCCACCGCU | 1089 |
| | | | | | GUCCCC | |
| 53335_4_537 | BCL11a | Exon 4 | − | chr2: 60461942-60461967 | CUCUAGGAGACUUAGAGAG | 1090 |
| | | | | | CUGGCA | |
| 53335_4_538 | BCL11a | Exon 4 | − | chr2: 60461943-60461968 | UCUCUAGGAGACUUAGAGA | 1091 |
| | | | | | GCUGGC | |
| 53335_4_539 | BCL11a | Exon 4 | − | chr2: 60461947-60461972 | GAUUUCUCUAGGAGACUUA | 1092 |
| | | | | | GAGAGC | |
| 53335_4_540 | BCL11a | Exon 4 | − | chr2: 60461963-60461988 | GGAGCCUCCCGCCAUGGAU | 1093 |
| | | | | | UUCUCU | |
| 53335_4_541 | BCL11a | Exon 4 | − | chr2: 60461974-60461999 | CCAAUGGCUAUGGAGCCUC | 1094 |
| | | | | | CCGCCA | |
| 53335_4_542 | BCL11a | Exon 4 | − | chr2: 60461989-60462014 | GUGCUGCGGUUGAAUCCAA | 1095 |
| | | | | | UGGCUA | |
| 53335_4_543 | BCL11a | Exon 4 | − | chr2: 60461995-60462020 | GACAGGGUGCUGCGGUUGA | 1096 |
| | | | | | AUCCAA | |
| 53335_4_544 | BCL11a | Exon 4 | − | chr2: 60462008-60462033 | CCCGAGUGCCUUUGACAGG | 1097 |
| | | | | | GUGCUG | |
| 53335_4_545 | BCL11a | Exon 4 | − | chr2: 60462016-60462041 | ACCCAUCACCCGAGUGCCU | 1098 |
| | | | | | UUGACA | |
| 53335_4_546 | BCL11a | Exon 4 | − | chr2: 60462017-60462042 | CACCCAUCACCCGAGUGCC | 1099 |
| | | | | | UUUGAC | |
| 53335_4_547 | BCL11a | Exon 4 | − | chr2: 60462046-60462071 | CGCCUGGGGGCGGAAGAGA | 1100 |
| | | | | | UGGCCC | |
| 53335_4_548 | BCL11a | Exon 4 | − | chr2: 60462052-60462077 | AUAGAGCGCCUGGGGGCGG | 1101 |
| | | | | | AAGAGA | |
| 53335_4_549 | BCL11a | Exon 4 | − | chr2: 60462061-60462086 | CCCCACCGCAUAGAGCGCC | 1102 |
| | | | | | UGGGGG | |
| 53335_4_550 | BCL11a | Exon 4 | − | chr2: 60462064-60462089 | GACCCCCACCGCAUAGAGC | 1103 |
| | | | | | GCCUGG | |
| 53335_4_551 | BCL11a | Exon 4 | − | chr2: 60462065-60462090 | GGACCCCCACCGCAUAGAG | 1104 |
| | | | | | CGCCUG | |
| 53335_4_552 | BCL11a | Exon 4 | − | chr2: 60462066-60462091 | UGGACCCCCACCGCAUAGA | 1105 |
| | | | | | GCGCCU | |
| 53335_4_553 | BCL11a | Exon 4 | − | chr2: 60462067-60462092 | UUGGACCCCCACCGCAUAG | 1106 |
| | | | | | AGCGCC | |
| 53335_4_554 | BCL11a | Exon 4 | − | chr2: 60462091-60462116 | UUUAGUCCACCACCGAGAC | 1107 |
| | | | | | AUCACU | |
| 53335_4_555 | BCL11a | Exon 4 | − | chr2: 60462143-60462168 | GAGAGAGGCUUCCGGCCUG | 1108 |
| | | | | | GCAGAA | |
| 53335_4_556 | BCL11a | Exon 4 | − | chr2: 60462144-60462169 | CGAGAGAGGCUUCCGGCCU | 1109 |
| | | | | | GGCAGA | |
| 53335_4_557 | BCL11a | Exon 4 | − | chr2: 60462151-60462176 | UCAGUAUCGAGAGAGGCUU | 1110 |
| | | | | | CCGGCC | |
| 53335_4_558 | BCL11a | Exon 4 | − | chr2: 60462156-60462181 | CAGGAUCAGUAUCGAGAGA | 1111 |
| | | | | | GGCUUC | |
| 53335_4_559 | BCL11a | Exon 4 | − | chr2: 60462163-60462188 | AGAAUACCAGGAUCAGUAU | 1112 |
| | | | | | CGAGAG | |
| 53335_4_560 | BCL11a | Exon 4 | − | chr2: 60462180-60462205 | ACCCCUUUAACCUGCUAAG | 1113 |
| | | | | | AAUACC | |
| 53335_4_561 | BCL11a | Exon 4 | − | chr2: 60462227-60462252 | AUGUCCUUCCCAGCCACCU | 1114 |
| | | | | | CUCCAU | |
| 53335_4_562 | BCL11a | Exon 4 | − | chr2: 60462228-60462253 | AAUGUCCUUCCCAGCCACC | 1115 |
| | | | | | UCUCCA | |
| 53335_4_563 | BCL11a | Exon 4 | − | chr2: 60462261-60462286 | CGCGGGUUGGUAUCCCUUC | 1116 |
| | | | | | AGGACU | |
| 53335_4_564 | BCL11a | Exon 4 | − | chr2: 60462267-60462292 | UGACCCCGCGGGUUGGUAU | 1117 |
| | | | | | CCCUUC | |
| 53335_4_565 | BCL11a | Exon 4 | − | chr2: 60462279-60462304 | ACGGAAGUCCCCUGACCCC | 1118 |
| | | | | | GCGGGU | |
| 53335_4_566 | BCL11a | Exon 4 | − | chr2: 60462283-60462308 | GAACACGGAAGUCCCCUGA | 1119 |
| | | | | | CCCCGC | |
| 53335_4_567 | BCL11a | Exon 4 | − | chr2: 60462284-60462309 | CGAACACGGAAGUCCCCUG | 1120 |
| | | | | | ACCCCG | |
| 53335_4_568 | BCL11a | Exon 4 | − | chr2: 60462303-60462328 | UAAGAAUCUACUUAGAAAG | 1121 |
| | | | | | CGAACA | |
| 53335_4_569 | BCL11a | Exon 4 | − | chr2: 60462333-60462358 | UCUUGCAACACGCACAGAA | 1122 |
| | | | | | CACUCA | |
| 53335_4_570 | BCL11a | Exon 4 | − | chr2: 60462365-60462390 | UUGCAAACAGCCAUUCACC | 1123 |
| | | | | | AGUGCA | |
| 53335_3_1 | BCL11a | Exon 3 | + | chr2: 60468716-60468741 | UAAGGCUCAACUUACAAAU | 1124 |
| | | | | | ACCCUG | |
| 53335_3_2 | BCL11a | Exon 3 | + | chr2: 60468717-60468742 | AAGGCUCAACUUACAAAUA | 1125 |
| | | | | | CCCUGC | |
| 53335_3_3 | BCL11a | Exon 3 | + | chr2: 60468718-60468743 | AGGCUCAACUUACAAAUAC | 1126 |
| | | | | | CCUGCG | |
| 53335_3_4 | BCL11a | Exon 3 | + | chr2: 60468740-60468765 | GCGGGGCAUAUUCUGCACU | 1127 |
| | | | | | CAUCCC | |
| 53335_3_5 | BCL11a | Exon 3 | + | chr2: 60468745-60468770 | GCAUAUUCUGCACUCAUCC | 1128 |
| | | | | | CAGGCG | |
| 53335_3_6 | BCL11a | Exon 3 | + | chr2: 60468746-60468771 | CAUAUUCUGCACUCAUCCC | 1129 |
| | | | | | AGGCGU | |
| 53335_3_7 | BCL11a | Exon 3 | + | chr2: 60468747-60468772 | AUAUUCUGCACUCAUCCCA | 1130 |
| | | | | | GGCGUG | |
| 53335_3_8 | BCL11a | Exon 3 | + | chr2: 60468773-60468798 | GGAUUAGAGCUCCAUGUGC | 1131 |
| | | | | | AGAACG | |
| 53335_3_9 | BCL11a | Exon 3 | + | chr2: 60468774-60468799 | GAUUAGAGCUCCAUGUGCA | 1132 |
| | | | | | GAACGA | |
| 53335_3_10 | BCL11a | Exon 3 | + | chr2: 60468775-60468800 | AUUAGAGCUCCAUGUGCAG | 1133 |
| | | | | | AACGAG | |
| 53335_3_11 | BCL11a | Exon 3 | + | chr2: 60468778-60468803 | AGAGCUCCAUGUGCAGAAC | 1134 |
| | | | | | GAGGGG | |
| 53335_3_12 | BCL11a | Exon 3 | + | chr2: 60468783-60468808 | UCCAUGUGCAGAACGAGGG | 1135 |
| | | | | | GAGGAG | |
| 53335_3_13 | BCL11a | Exon 3 | − | chr2: 60468739-60468764 | GGAUGAGUGCAGAAUAUGC | 1136 |
| | | | | | CCCGCA | |
| 53335_3_14 | BCL11a | Exon 3 | − | chr2: 60468740-60468765 | GGGAUGAGUGCAGAAUAUG | 1137 |
| | | | | | CCCCGC | |
| 53335_3_15 | BCL11a | Exon 3 | − | chr2: 60468765-60468790 | ACAUGGAGCUCUAAUCCCC | 1138 |
| | | | | | ACGCCU | |
| 53335_3_16 | BCL11a | Exon 3 | − | chr2: 60468766-60468791 | CACAUGGAGCUCUAAUCCC | 1139 |
| | | | | | CACGCC | |
| 53335_3_17 | BCL11a | Exon 3 | − | chr2: 60468787-60468812 | GCCUCUCCUCCCCUCGUUC | 1140 |
| | | | | | UGCACA | |
| 53335_3_18 | BCL11a | Exon 3 | − | chr2: 60468814-60468839 | UCACAGAUAAACUUCUGCA | 1141 |
| | | | | | CUGGAG | |
| 53335_3_19 | BCL11a | Exon 3 | − | chr2: 60468815-60468840 | UUCACAGAUAAACUUCUGC | 1142 |
| | | | | | ACUGGA | |
| 53335_3_20 | BCL11a | Exon 3 | − | chr2: 60468816-60468841 | UUUCACAGAUAAACUUCUG | 1143 |
| | | | | | CACUGG | |
| 53335_3_21 | BCL11a | Exon 3 | − | chr2: 60468819-60468844 | UUCUUUCACAGAUAAACUU | 1144 |
| | | | | | CUGCAC | |
| 53335_2_1 | BCL11a | Exon 2 | + | chr2: 60545963-60545988 | CAUUUACCUGCUAUGUGUU | 1145 |
| | | | | | CCUGUU | |
| 53335_2_2 | BCL11a | Exon 2 | + | chr2: 60545964-60545989 | AUUUACCUGCUAUGUGUUC | 1146 |
| | | | | | CUGUUU | |
| 53335_2_3 | BCL11a | Exon 2 | + | chr2: 60545965-60545990 | UUUACCUGCUAUGUGUUCC | 1147 |
| | | | | | UGUUUG | |
| 53335_2_4 | BCL11a | Exon 2 | + | chr2: 60546009-60546034 | ACGUUGAUAAACAAUCGUC | 1148 |
| | | | | | AUCCUC | |
| 53335_2_5 | BCL11a | Exon 2 | + | chr2: 60546019-60546044 | ACAAUCGUCAUCCUCUGGC | 1149 |
| | | | | | GUGACC | |
| 53335_2_6 | BCL11a | Exon 2 | + | chr2: 60546035-60546060 | GGCGUGACCUGGAUGCCAA | 1150 |
| | | | | | CCUCCA | |
| 53335_2_7 | BCL11a | Exon 2 | + | chr2: 60546036-60546061 | GCGUGACCUGGAUGCCAAC | 1151 |
| | | | | | CUCCAC | |
| 53335_2_8 | BCL11a | Exon 2 | + | chr2: 60546041-60546066 | ACCUGGAUGCCAACCUCCA | 1152 |
| | | | | | CGGGAU | |
| 53335_2_9 | BCL11a | Exon 2 | + | chr2: 60546063-60546088 | GAUUGGAUGCUUUUUUCAU | 1153 |
| | | | | | CUCGAU | |
| 53335_2_10 | BCL11a | Exon 2 | + | chr2: 60546069-60546094 | AUGCUUUUUUCAUCUCGAU | 1154 |
| | | | | | UGGUGA | |
| 53335_2_11 | BCL11a | Exon 2 | + | chr2: 60546070-60546095 | UGCUUUUUUCAUCUCGAUU | 1155 |
| | | | | | GGUGAA | |
| 53335_2_12 | BCL11a | Exon 2 | + | chr2: 60546071-60546096 | GCUUUUUUCAUCUCGAUUG | 1156 |
| | | | | | GUGAAG | |
| 53335_2_13 | BCL11a | Exon 2 | + | chr2: 60546075-60546100 | UUUUCAUCUCGAUUGGUGA | 1157 |
| | | | | | AGGGGA | |
| 53335_2_14 | BCL11a | Exon 2 | + | chr2: 60546078-60546103 | UCAUCUCGAUUGGUGAAGG | 1158 |
| | | | | | GGAAGG | |
| 53335_2_15 | BCL11a | Exon 2 | + | chr2: 60546106-60546131 | CUUAUCCACAGCUUUUUCU | 1159 |
| | | | | | AAGCAG | |
| 53335_2_16 | BCL11a | Exon 2 | + | chr2: 60546162-60546187 | CGAUAAAAAUAAGAAUGUC | 1160 |
| | | | | | CCCCAA | |
| 53335_2_17 | BCL11a | Exon 2 | + | chr2: 60546163-60546188 | GAUAAAAAUAAGAAUGUCC | 1161 |
| | | | | | CCCAAU | |
| 53335_2_18 | BCL11a | Exon 2 | + | chr2: 60546175-60546200 | AAUGUCCCCCAAUGGGAAG | 1162 |
| | | | | | UUCAUC | |
| 53335_2_19 | BCL11a | Exon 2 | + | chr2: 60546188-60546213 | GGGAAGUUCAUCUGGCACU | 1163 |
| | | | | | GCCCAC | |
| 53335_2_20 | BCL11a | Exon 2 | + | chr2: 60546193-60546218 | GUUCAUCUGGCACUGCCCA | 1164 |
| | | | | | CAGGUG | |
| 53335_2_21 | BCL11a | Exon 2 | + | chr2: 60546196-60546221 | CAUCUGGCACUGCCCACAG | 1165 |
| | | | | | GUGAGG | |
| 53335_2_22 | BCL11a | Exon 2 | + | chr2: 60546213-60546238 | AGGUGAGGAGGUCAUGAUC | 1166 |
| | | | | | CCCUUC | |
| 53335_2_23 | BCL11a | Exon 2 | + | chr2: 60546225-60546250 | CAUGAUCCCCUUCUGGAGC | 1167 |
| | | | | | UCCCAA | |
| 53335_2_24 | BCL11a | Exon 2 | + | chr2: 60546226-60546251 | AUGAUCCCCUUCUGGAGCU | 1168 |
| | | | | | CCCAAC | |
| 53335_2_25 | BCL11a | Exon 2 | + | chr2: 60546232-60546257 | CCCUUCUGGAGCUCCCAAC | 1169 |
| | | | | | GGGCCG | |
| 53335_2_26 | BCL11a | Exon 2 | + | chr2: 60546237-60546262 | CUGGAGCUCCCAACGGGCC | 1170 |
| | | | | | GUGGUC | |
| 53335_2_27 | BCL11a | Exon 2 | + | chr2: 60546257-60546282 | UGGUCUGGUUCAUCAUCUG | 1171 |
| | | | | | UAAGAA | |
| 53335_2_28 | BCL11a | Exon 2 | + | chr2: 60546267-60546292 | CAUCAUCUGUAAGAAUGGC | 1172 |
| | | | | | UUCAAG | |
| 53335_2_29 | BCL11a | Exon 2 | + | chr2: 60546272-60546297 | UCUGUAAGAAUGGCUUCAA | 1173 |
| | | | | | GAGGCU | |
| 53335_2_30 | BCL11a | Exon 2 | + | chr2: 60546278-60546303 | AGAAUGGCUUCAAGAGGCU | 1174 |
| | | | | | CGGCUG | |
| 53335_2_31 | BCL11a | Exon 2 | + | chr2: 60546282-60546307 | UGGCUUCAAGAGGCUCGGC | 1175 |
| | | | | | UGUGGU | |
| 53335_2_32 | BCL11a | Exon 2 | − | chr2: 60545956-60545981 | ACACAUAGCAGGUAAAUGA | 1176 |
| | | | | | GAAGCA | |
| 53335_2_33 | BCL11a | Exon 2 | − | chr2: 60545972-60545997 | UUUGCCCCAAACAGGAACA | 1177 |
| | | | | | CAUAGC | |
| 53335_2_34 | BCL11a | Exon 2 | − | chr2: 60545985-60546010 | UCAUCUAGAGGAAUUUGCC | 1178 |
| | | | | | CCAAAC | |
| 53335_2_35 | BCL11a | Exon 2 | − | chr2: 60546002-60546027 | ACGAUUGUUUAUCAACGUC | 1179 |
| | | | | | AUCUAG | |
| 53335_2_36 | BCL11a | Exon 2 | − | chr2: 60546033-60546058 | GAGGUUGGCAUCCAGGUCA | 1180 |
| | | | | | CGCCAG | |
| 53335_2_37 | BCL11a | Exon 2 | − | chr2: 60546045-60546070 | UCCAAUCCCGUGGAGGUUG | 1181 |
| | | | | | GCAUCC | |
| 53335_2_38 | BCL11a | Exon 2 | − | chr2: 60546053-60546078 | AAAAAGCAUCCAAUCCCGU | 1182 |
| | | | | | GGAGGU | |
| 53335_2_39 | BCL11a | Exon 2 | − | chr2: 60546057-60546082 | AUGAAAAAAGCAUCCAAUC | 1183 |
| | | | | | CCGUGG | |
| 53335_2_40 | BCL11a | Exon 2 | − | chr2: 60546060-60546085 | GAGAUGAAAAAAGCAUCCA | 1184 |
| | | | | | AUCCCG | |
| 53335_2_41 | BCL11a | Exon 2 | − | chr2: 60546114-60546139 | GGCAGCCUCUGCUUAGAAA | 1185 |
| | | | | | AAGCUG | |
| 53335_2_42 | BCL11a | Exon 2 | − | chr2: 60546140-60546165 | UCGAGCACAAACGGAAACA | 1186 |
| | | | | | AUGCAA | |
| 53335_2_43 | BCL11a | Exon 2 | − | chr2: 60546154-60546179 | CAUUCUUAUUUUUAUCGAG | 1187 |
| | | | | | CACAAA | |
| 53335_2_44 | BCL11a | Exon 2 | − | chr2: 60546183-60546208 | CAGUGCCAGAUGAACUUCC | 1188 |
| | | | | | CAUUGG | |
| 53335_2_45 | BCL11a | Exon 2 | − | chr2: 60546184-60546209 | GCAGUGCCAGAUGAACUUC | 1189 |
| | | | | | CCAUUG | |
| 53335_2_46 | BCL11a | Exon 2 | − | chr2: 60546185-60546210 | GGCAGUGCCAGAUGAACUU | 1190 |
| | | | | | CCCAUU | |
| 53335_2_47 | BCL11a | Exon 2 | − | chr2: 60546186-60546211 | GGGCAGUGCCAGAUGAACU | 1191 |
| | | | | | UCCCAU | |
| 53335_2_48 | BCL11a | Exon 2 | − | chr2: 60546211-60546236 | AGGGGAUCAUGACCUCCUC | 1192 |
| | | | | | ACCUGU | |
| 53335_2_49 | BCL11a | Exon 2 | − | chr2: 60546212-60546237 | AAGGGGAUCAUGACCUCCU | 1193 |
| | | | | | CACCUG | |
| 53335_2_50 | BCL11a | Exon 2 | − | chr2: 60546234-60546259 | CACGGCCCGUUGGGAGCUC | 1194 |
| | | | | | CAGAAG | |
| 53335_2_51 | BCL11a | Exon 2 | − | chr2: 60546235-60546260 | CCACGGCCCGUUGGGAGCU | 1195 |
| | | | | | CCAGAA | |
| 53335_2_52 | BCL11a | Exon 2 | − | chr2: 60546236-60546261 | ACCACGGCCCGUUGGGAGC | 1196 |
| | | | | | UCCAGA | |
| 53335_2_53 | BCL11a | Exon 2 | − | chr2: 60546248-60546273 | AUGAUGAACCAGACCACGG | 1197 |
| | | | | | CCCGUU | |
| 53335_2_54 | BCL11a | Exon 2 | − | chr2: 60546249-60546274 | GAUGAUGAACCAGACCACG | 1198 |
| | | | | | GCCCGU | |
| 53335_2_55 | BCL11a | Exon 2 | − | chr2: 60546257-60546282 | UUCUUACAGAUGAUGAACC | 1199 |
| | | | | | AGACCA | |
| 53335_1_1 | BCL11a | Exon 1 | + | chr2: 60553216-60553241 | CGAGAAUUCCCGUUUGCUU | 1200 |
| | | | | | AAGUGC | |
| 53335_1_2 | BCL11a | Exon 1 | + | chr2: 60553217-60553242 | GAGAAUUCCCGUUUGCUUA | 1201 |
| | | | | | AGUGCU | |
| 53335_1_3 | BCL11a | Exon 1 | + | chr2: 60553218-60553243 | AGAAUUCCCGUUUGCUUAA | 1202 |
| | | | | | GUGCUG | |
| 53335_1_4 | BCL11a | Exon 1 | + | chr2: 60553234-60553259 | UAAGUGCUGGGGUUUGCCU | 1203 |
| | | | | | UGCUUG | |
| 53335_1_5 | BCL11a | Exon 1 | + | chr2: 60553244-60553269 | GGUUUGCCUUGCUUGCGGC | 1204 |
| | | | | | GAGACA | |
| 53335_1_6 | BCL11a | Exon 1 | + | chr2: 60553247-60553272 | UUGCCUUGCUUGCGGCGAG | 1205 |
| | | | | | ACAUGG | |
| 53335_1_7 | BCL11a | Exon 1 | + | chr2: 60553248-60553273 | UGCCUUGCUUGCGGCGAGA | 1206 |
| | | | | | CAUGGU | |
| 53335_1_8 | BCL11a | Exon 1 | + | chr2: 60553254-60553279 | GCUUGCGGCGAGACAUGGU | 1207 |
| | | | | | GGGCUG | |
| 53335_1_9 | BCL11a | Exon 1 | + | chr2: 60553255-60553280 | CUUGCGGCGAGACAUGGUG | 1208 |
| | | | | | GGCUGC | |
| 53335_1_10 | BCL11a | Exon 1 | + | chr2: 60553256-60553281 | UUGCGGCGAGACAUGGUGG | 1209 |
| | | | | | GCUGCG | |
| 53335_1_11 | BCL11a | Exon 1 | + | chr2: 60553291-60553316 | CGGCGGCGGCGGCGGCGGC | 1210 |
| | | | | | GGCGGG | |
| 53335_1_12 | BCL11a | Exon 1 | + | chr2: 60553298-60553323 | GGCGGCGGCGGCGGCGGGC | 1211 |
| | | | | | GGACGA | |
| 53335_1_13 | BCL11a | Exon 1 | + | chr2: 60553303-60553328 | CGGCGGCGGCGGGCGGACG | 1212 |
| | | | | | ACGGCU | |
| 53335_1_14 | BCL11a | Exon 1 | + | chr2: 60553313-60553338 | GGGCGGACGACGGCUCGGU | 1213 |
| | | | | | UCACAU | |
| 53335_1_15 | BCL11a | Exon 1 | + | chr2: 60553314-60553339 | GGCGGACGACGGCUCGGUU | 1214 |
| | | | | | CACAUC | |
| 53335_1_16 | BCL11a | Exon 1 | + | chr2: 60553322-60553347 | ACGGCUCGGUUCACAUCGG | 1215 |
| | | | | | GAGAGC | |
| 53335_1_17 | BCL11a | Exon 1 | + | chr2: 60553323-60553348 | CGGCUCGGUUCACAUCGGG | 1216 |
| | | | | | AGAGCC | |
| 53335_1_18 | BCL11a | Exon 1 | + | chr2: 60553335-60553360 | CAUCGGGAGAGCCGGGUUA | 1217 |
| | | | | | GAAAGA | |
| 53335_1_19 | BCL11a | Exon 1 | + | chr2: 60553406-60553431 | AAAUAAAUUAGAAAUAAUA | 1218 |
| | | | | | CAAAGA | |
| 53335_1_20 | BCL11a | Exon 1 | + | chr2: 60553412-60553437 | AUUAGAAAUAAUACAAAGA | 1219 |
| | | | | | UGGCGC | |
| 53335_1_21 | BCL11a | Exon 1 | + | chr2: 60553413-60553438 | UUAGAAAUAAUACAAAGAU | 1220 |
| | | | | | GGCGCA | |
| 53335_1_22 | BCL11a | Exon 1 | + | chr2: 60553427-60553452 | AAGAUGGCGCAGGGAAGAU | 1221 |
| | | | | | GAAUUG | |
| 53335_1_23 | BCL11a | Exon 1 | + | chr2: 60553428-60553453 | AGAUGGCGCAGGGAAGAUG | 1222 |
| | | | | | AAUUGU | |
| 53335_1_24 | BCL11a | Exon 1 | + | chr2: 60553441-60553466 | AAGAUGAAUUGUGGGAGAG | 1223 |
| | | | | | CCGUCA | |
| 53335_1_25 | BCL11a | Exon 1 | − | chr2: 60553227-60553252 | GGCAAACCCCAGCACUUAA | 1224 |
| | | | | | GCAAAC | |
| 53335_1_26 | BCL11a | Exon 1 | − | chr2: 60553228-60553253 | AGGCAAACCCCAGCACUUA | 1225 |
| | | | | | AGCAAA | |
| 53335_1_27 | BCL11a | Exon 1 | − | chr2: 60553253-60553278 | AGCCCACCAUGUCUCGCCG | 1226 |
| | | | | | CAAGCA | |
| 53335_1_28 | BCL11a | Exon 1 | − | chr2: 60553349-60553374 | CUCUGGAGUCUCCUUCUUU | 1227 |
| | | | | | CUAACC | |
| 53335_1_29 | BCL11a | Exon 1 | − | chr2: 60553371-60553396 | AAGGCACUGAUGAAGAUAU | 1228 |
| | | | | | UUUCUC | |
| 53335_1_30 | BCL11a | Exon 1 | − | chr2: 60553395-60553420 | UUUCUAAUUUAUUUUGGAU | 1229 |
| | | | | | GUCAAA | |
| 53335_1_31 | BCL11a | Exon 1 | − | chr2: 60553406-60553431 | UCUUUGUAUUAUUUCUAAU | 1230 |
| | | | | | UUAUUU | |
| 53335_1_32 | BCL11a | Exon 1 | − | chr2: 60553463-60553488 | AAAAAAGCUUAAAAAAAAG | 1231 |
| | | | | | CCAUGA | |

TABLE 2
gRNA targeting domains targeting BCL11a Intron 2 (e.g., to a BCL11a Enhancer)

| | | | | | | SEQ |
|---|---|---|---|---|---|---|
| | | Target | | Targeting Site | | ID |
| Id. | Target | Region | Strand | (hg38) | gRNA Targeting Domain | NO: |
| 53335_I2_1 | BCL11a | Intron 2 | + | chr2: 60494277-60494302 | GGGAGUUUGGCUUCUCA | 1232 |
| | | | | | UCUGUGCA | |
| 53335_I2_2 | BCL11a | Intron 2 | + | chr2: 60494289-60494314 | UCUCAUCUGUGCAUGGC | 1233 |
| | | | | | CUCUAAAC | |
| 53335_I2_3 | BCL11a | Intron 2 | + | chr2: 60494290-60494315 | CUCAUCUGUGCAUGGCC | 1234 |
| | | | | | UCUAAACU | |
| 53335_I2_4 | BCL11a | Intron 2 | + | chr2: 60494302-60494327 | UGGCCUCUAAACUGGGC | 1235 |
| | | | | | AGUGACCA | |
| 53335_I2_5 | BCL11a | Intron 2 | + | chr2: 60494307-60494332 | UCUAAACUGGGCAGUGA | 1236 |
| | | | | | CCAUGGCC | |
| 53335_I2_6 | BCL11a | Intron 2 | + | chr2: 60494324-60494349 | CCAUGGCCUGGUCACCU | 1237 |
| | | | | | CCCCACUC | |
| 53335_I2_7 | BCL11a | Intron 2 | + | chr2: 60494330-60494355 | CCUGGUCACCUCCCCACU | 1238 |
| | | | | | CUGGACC | |
| 53335_I2_8 | BCL11a | Intron 2 | + | chr2: 60494331-60494356 | CUGGUCACCUCCCCACUC | 1239 |
| | | | | | UGGACCU | |
| 53335_I2_9 | BCL11a | Intron 2 | + | chr2: 60494351-60494376 | GACCUGGGUUGCCCCUC | 1240 |
| | | | | | UGUAAACA | |
| 53335_I2_10 | BCL11a | Intron 2 | + | chr2: 60494354-60494379 | CUGGGUUGCCCCUCUGU | 1241 |
| | | | | | AAACAAGG | |
| 53335_I2_11 | BCL11a | Intron 2 | + | chr2: 60494418-60494443 | AAAUCUUAUGCAAUUUU | 1242 |
| | | | | | UGCCAAGA | |
| 53335_I2_12 | BCL11a | Intron 2 | + | chr2: 60494419-60494444 | AAUCUUAUGCAAUUUUU | 1243 |
| | | | | | GCCAAGAU | |
| 53335_I2_13 | BCL11a | Intron 2 | + | chr2: 60494426-60494451 | UGCAAUUUUUGCCAAGA | 1244 |
| | | | | | UGGGAGUA | |
| 53335_I2_14 | BCL11a | Intron 2 | + | chr2: 60494427-60494452 | GCAAUUUUUGCCAAGAU | 1245 |
| | | | | | GGGAGUAU | |
| 53335_I2_15 | BCL11a | Intron 2 | + | chr2: 60494428-60494453 | CAAUUUUUGCCAAGAUG | 1246 |
| | | | | | GGAGUAUG | |
| 53335_I2_16 | BCL11a | Intron 2 | + | chr2: 60494440-60494465 | AGAUGGGAGUAUGGGGA | 1247 |
| | | | | | GAGAAGAG | |
| 53335_I2_17 | BCL11a | Intron 2 | + | chr2: 60494446-60494471 | GAGUAUGGGGAGAGAAG | 1248 |
| | | | | | AGUGGAAA | |
| 53335_I2_18 | BCL11a | Intron 2 | + | chr2: 60494477-60494502 | AGAGCUCAGUGAGAUGA | 1249 |
| | | | | | GAUAUCAA | |
| 53335_I2_19 | BCL11a | Intron 2 | + | chr2: 60494478-60494503 | GAGCUCAGUGAGAUGAG | 1250 |
| | | | | | AUAUCAAA | |
| 53335_I2_20 | BCL11a | Intron 2 | + | chr2: 60494479-60494504 | AGCUCAGUGAGAUGAGA | 1251 |
| | | | | | UAUCAAAG | |
| 53335_I2_21 | BCL11a | Intron 2 | + | chr2: 60494518-60494543 | UCAUUCCAUCUCCCUAA | 1252 |
| | | | | | UCUCCAAU | |
| 53335_I2_22 | BCL11a | Intron 2 | + | chr2: 60494533-60494558 | AAUCUCCAAUUGGCAAA | 1253 |
| | | | | | GCCAGACU | |
| 53335_I2_23 | BCL11a | Intron 2 | + | chr2: 60494534-60494559 | AUCUCCAAUUGGCAAAG | 1254 |
| | | | | | CCAGACUU | |
| 53335_I2_24 | BCL11a | Intron 2 | + | chr2: 60494535-60494560 | UCUCCAAUUGGCAAAGC | 1255 |
| | | | | | CAGACUUG | |
| 53335_I2_25 | BCL11a | Intron 2 | + | chr2: 60494548-60494573 | AAGCCAGACUUGGGGCA | 1256 |
| | | | | | AUACAGAC | |
| 53335_I2_26 | BCL11a | Intron 2 | + | chr2: 60494617-60494642 | UAUCACCAAAUGUUCUU | 1257 |
| | | | | | UCUUCAGC | |
| 53335_I2_27 | BCL11a | Intron 2 | + | chr2: 60494631-60494656 | CUUUCUUCAGCUGGAAU | 1258 |
| | | | | | UUAAAAUA | |
| 53335_I2_28 | BCL11a | Intron 2 | + | chr2: 60494649-60494674 | UAAAAUAUGGACUCAUC | 1259 |
| | | | | | CGUAAAAU | |
| 53335_I2_29 | BCL11a | Intron 2 | + | chr2: 60494675-60494700 | GGAAUAAUAAUAGUAUA | 1260 |
| | | | | | UGCUUCAU | |
| 53335_I2_30 | BCL11a | Intron 2 | + | chr2: 60494676-60494701 | GAAUAAUAAUAGUAUAU | 1261 |
| | | | | | GCUUCAUA | |
| 53335_I2_31 | BCL11a | Intron 2 | + | chr2: 60494766-60494791 | GCUUGUGAACUAAAAUG | 1262 |
| | | | | | CUGCCUCC | |
| 53335_I2_32 | BCL11a | Intron 2 | + | chr2: 60494806-60494831 | ACACCUCAGCAGAAACA | 1263 |
| | | | | | AAGUUAUC | |
| 53335_I2_33 | BCL11a | Intron 2 | + | chr2: 60494830-60494855 | CAGGCCCUUUCCCCAAU | 1264 |
| | | | | | UCCUAGUU | |
| 53335_I2_34 | BCL11a | Intron 2 | + | chr2: 60494831-60494856 | AGGCCCUUUCCCCAAUU | 1265 |
| | | | | | CCUAGUUU | |
| 53335_I2_35 | BCL11a | Intron 2 | + | chr2: 60494844-60494869 | AAUUCCUAGUUUGGGUC | 1266 |
| | | | | | AGAAGAAA | |
| 53335_I2_36 | BCL11a | Intron 2 | + | chr2: 60494845-60494870 | AUUCCUAGUUUGGGUCA | 1267 |
| | | | | | GAAGAAAA | |
| 53335_I2_37 | BCL11a | Intron 2 | + | chr2: 60494851-60494876 | AGUUUGGGUCAGAAGAA | 1268 |
| | | | | | AAGGGAAA | |
| 53335_I2_38 | BCL11a | Intron 2 | + | chr2: 60494852-60494877 | GUUUGGGUCAGAAGAAA | 1269 |
| | | | | | AGGGAAAA | |
| 53335_I2_39 | BCL11a | Intron 2 | + | chr2: 60494857-60494882 | GGUCAGAAGAAAAGGGA | 1270 |
| | | | | | AAAGGGAG | |
| 53335_I2_40 | BCL11a | Intron 2 | + | chr2: 60494864-60494889 | AGAAAAGGGAAAAGGGA | 1271 |
| | | | | | GAGGAAAA | |
| 53335_I2_41 | BCL11a | Intron 2 | + | chr2: 60494883-60494908 | GGAAAAAGGAAAAGAAU | 1272 |
| | | | | | AUGACGUC | |
| 53335_I2_42 | BCL11a | Intron 2 | + | chr2: 60494884-60494909 | GAAAAAGGAAAAGAAUA | 1273 |
| | | | | | UGACGUCA | |
| 53335_I2_43 | BCL11a | Intron 2 | + | chr2: 60494885-60494910 | AAAAAGGAAAAGAAUAU | 1274 |
| | | | | | GACGUCAG | |
| 53335_I2_44 | BCL11a | Intron 2 | + | chr2: 60494886-60494911 | AAAAGGAAAAGAAUAUG | 1275 |
| | | | | | ACGUCAGG | |
| 53335_I2_45 | BCL11a | Intron 2 | + | chr2: 60494889-60494914 | AGGAAAAGAAUAUGACG | 1276 |
| | | | | | UCAGGGGG | |
| 53335_I2_46 | BCL11a | Intron 2 | + | chr2: 60494901-60494926 | UGACGUCAGGGGGAGGC | 1277 |
| | | | | | AAGUCAGU | |
| 53335_I2_47 | BCL11a | Intron 2 | + | chr2: 60494902-60494927 | GACGUCAGGGGGAGGCA | 1278 |
| | | | | | AGUCAGUU | |
| 53335_I2_48 | BCL11a | Intron 2 | + | chr2: 60494928-60494953 | GGAACACAGAUCCUAAC | 1279 |
| | | | | | ACAGUAGC | |
| 53335_I2_49 | BCL11a | Intron 2 | + | chr2: 60494939-60494964 | CCUAACACAGUAGCUGG | 1280 |
| | | | | | UACCUGAU | |
| 53335_I2_50 | BCL11a | Intron 2 | + | chr2: 60494955-60494980 | GUACCUGAUAGGUGCCU | 1281 |
| | | | | | AUAUGUGA | |
| 53335_I2_51 | BCL11a | Intron 2 | + | chr2: 60494959-60494984 | CUGAUAGGUGCCUAUAU | 1282 |
| | | | | | GUGAUGGA | |
| 53335_I2_52 | BCL11a | Intron 2 | + | chr2: 60494960-60494985 | UGAUAGGUGCCUAUAUG | 1283 |
| | | | | | UGAUGGAU | |
| 53335_I2_53 | BCL11a | Intron 2 | + | chr2: 60494963-60494988 | UAGGUGCCUAUAUGUGA | 1284 |
| | | | | | UGGAUGGG | |
| 53335_I2_54 | BCL11a | Intron 2 | + | chr2: 60494986-60495011 | GGUGGACAGCCCGACAG | 1285 |
| | | | | | AUGAAAAA | |
| 53335_I2_55 | BCL11a | Intron 2 | + | chr2: 60494998-60495023 | GACAGAUGAAAAAUGGA | 1286 |
| | | | | | CAAUUAUG | |
| 53335_I2_56 | BCL11a | Intron 2 | + | chr2: 60495001-60495026 | AGAUGAAAAAUGGACAA | 1287 |
| | | | | | UUAUGAGG | |
| 53335_I2_57 | BCL11a | Intron 2 | + | chr2: 60495002-60495027 | GAUGAAAAAUGGACAAU | 1288 |
| | | | | | UAUGAGGA | |
| 53335_I2_58 | BCL11a | Intron 2 | + | chr2: 60495003-60495028 | AUGAAAAAUGGACAAUU | 1289 |
| | | | | | AUGAGGAG | |
| 53335_I2_59 | BCL11a | Intron 2 | + | chr2: 60495017-60495042 | AUUAUGAGGAGGGGAGA | 1290 |
| | | | | | GUGCAGAC | |
| 53335_I2_60 | BCL11a | Intron 2 | + | chr2: 60495018-60495043 | UUAUGAGGAGGGGAGAG | 1291 |
| | | | | | UGCAGACA | |
| 53335_I2_61 | BCL11a | Intron 2 | + | chr2: 60495019-60495044 | UAUGAGGAGGGGAGAGU | 1292 |
| | | | | | GCAGACAG | |
| 53335_I2_62 | BCL11a | Intron 2 | + | chr2: 60495045-60495070 | GGAAGCUUCACCUCCUU | 1293 |
| | | | | | UACAAUUU | |
| 53335_I2_63 | BCL11a | Intron 2 | + | chr2: 60495046-60495071 | GAAGCUUCACCUCCUUU | 1294 |
| | | | | | ACAAUUUU | |
| 53335_I2_64 | BCL11a | Intron 2 | + | chr2: 60495057-60495082 | UCCUUUACAAUUUUGGG | 1295 |
| | | | | | AGUCCACA | |
| 53335_I2_65 | BCL11a | Intron 2 | + | chr2: 60495062-60495087 | UACAAUUUUGGGAGUCC | 1296 |
| | | | | | ACACGGCA | |
| 53335_I2_66 | BCL11a | Intron 2 | + | chr2: 60495135-60495160 | CAUCACCAAGAGAGCCU | 1297 |
| | | | | | UCCGAAAG | |
| 53335_I2_67 | BCL11a | Intron 2 | + | chr2: 60495144-60495169 | GAGAGCCUUCCGAAAGA | 1298 |
| | | | | | GGCCCCCC | |
| 53335_I2_68 | BCL11a | Intron 2 | + | chr2: 60495145-60495170 | AGAGCCUUCCGAAAGAG | 1299 |
| | | | | | GCCCCCCU | |
| 53335_I2_69 | BCL11a | Intron 2 | + | chr2: 60495152-60495177 | UCCGAAAGAGGCCCCCC | 1300 |
| | | | | | UGGGCAAA | |
| 53335_I2_70 | BCL11a | Intron 2 | + | chr2: 60495162-60495187 | GCCCCCCUGGGCAAACG | 1301 |
| | | | | | GCCACCGA | |
| 53335_I2_71 | BCL11a | Intron 2 | + | chr2: 60495167-60495192 | CCUGGGCAAACGGCCAC | 1302 |
| | | | | | CGAUGGAG | |
| 53335_I2_72 | BCL11a | Intron 2 | + | chr2: 60495215-60495240 | CCACCCACGCCCCCACCC | 1303 |
| | | | | | UAAUCAG | |
| 53335_I2_73 | BCL11a | Intron 2 | + | chr2: 60495230-60495255 | CCCUAAUCAGAGGCCAA | 1304 |
| | | | | | ACCCUUCC | |
| 53335_I2_74 | BCL11a | Intron 2 | + | chr2: 60495293-60495318 | ACUAGCUUCAAAGUUGU | 1305 |
| | | | | | AUUGACCC | |
| 53335_I2_75 | BCL11a | Intron 2 | + | chr2: 60495333-60495358 | AAGAGUAGAUGCCAUAU | 1306 |
| | | | | | CUCUUUUC | |
| 53335_I2_76 | BCL11a | Intron 2 | + | chr2: 60495354-60495379 | UUUCUGGCCUAUGUUAU | 1307 |
| | | | | | UACCUGUA | |
| 53335_I2_77 | BCL11a | Intron 2 | + | chr2: 60495366-60495391 | GUUAUUACCUGUAUGGA | 1308 |
| | | | | | CUUUGCAC | |
| 53335_I2_78 | BCL11a | Intron 2 | + | chr2: 60495400-60495425 | CUAUCUGCUCUUACUUA | 1309 |
| | | | | | UGCACACC | |
| 53335_I2_79 | BCL11a | Intron 2 | + | chr2: 60495401-60495426 | UAUCUGCUCUUACUUAU | 1310 |
| | | | | | GCACACCU | |
| 53335_I2_80 | BCL11a | Intron 2 | + | chr2: 60495402-60495427 | AUCUGCUCUUACUUAUG | 1311 |
| | | | | | CACACCUG | |
| 53335_I2_81 | BCL11a | Intron 2 | + | chr2: 60495486-60495511 | CCUGUCUAGCUGCCUUC | 1312 |
| | | | | | CUUAUCAC | |
| 53335_I2_82 | BCL11a | Intron 2 | + | chr2: 60495500-60495525 | UUCCUUAUCACAGGAAU | 1313 |
| | | | | | AGCACCCA | |
| 53335_I2_83 | BCL11a | Intron 2 | + | chr2: 60495543-60495568 | GAGUAGAACCCCCUAUA | 1314 |
| | | | | | AACUAGUC | |
| 53335_I2_84 | BCL11a | Intron 2 | + | chr2: 60495554-60495579 | CCUAUAAACUAGUCUGG | 1315 |
| | | | | | UUUGCCCA | |
| 53335_I2_85 | BCL11a | Intron 2 | + | chr2: 60495555-60495580 | CUAUAAACUAGUCUGGU | 1316 |
| | | | | | UUGCCCAU | |
| 53335_I2_86 | BCL11a | Intron 2 | + | chr2: 60495556-60495581 | UAUAAACUAGUCUGGUU | 1317 |
| | | | | | UGCCCAUG | |
| 53335_I2_87 | BCL11a | Intron 2 | + | chr2: 60495566-60495591 | UCUGGUUUGCCCAUGGG | 1318 |
| | | | | | GCACAGUC | |
| 53335_I2_88 | BCL11a | Intron 2 | + | chr2: 60495578-60495603 | AUGGGGCACAGUCAGGC | 1319 |
| | | | | | UGUUUUCC | |
| 53335_I2_89 | BCL11a | Intron 2 | + | chr2: 60495579-60495604 | UGGGGCACAGUCAGGCU | 1320 |
| | | | | | GUUUUCCA | |
| 53335_I2_90 | BCL11a | Intron 2 | + | chr2: 60495582-60495607 | GGCACAGUCAGGCUGUU | 1321 |
| | | | | | UUCCAGGG | |
| 53335_I2_91 | BCL11a | Intron 2 | + | chr2: 60495583-60495608 | GCACAGUCAGGCUGUUU | 1322 |
| | | | | | UCCAGGGU | |
| 53335_I2_92 | BCL11a | Intron 2 | + | chr2: 60495584-60495609 | CACAGUCAGGCUGUUUU | 1323 |
| | | | | | CCAGGGUG | |
| 53335_I2_93 | BCL11a | Intron 2 | + | chr2: 60495661-60495686 | ACACACGUAUGUGUUGU | 1324 |
| | | | | | GAUCCCUG | |
| 53335_I2_94 | BCL11a | Intron 2 | + | chr2: 60495674-60495699 | UUGUGAUCCCUGUGGUU | 1325 |
| | | | | | UGAGAGUU | |
| 53335_I2_95 | BCL11a | Intron 2 | + | chr2: 60495706-60495731 | UCCCUAAAAGUCAAAAU | 1326 |
| | | | | | AUUCUCAA | |
| 53335_I2_96 | BCL11a | Intron 2 | + | chr2: 60495707-60495732 | CCCUAAAAGUCAAAAUA | 1327 |
| | | | | | UUCUCAAU | |
| 53335_I2_97 | BCL11a | Intron 2 | + | chr2: 60495735-60495760 | CCCUCAAUCAGCACAUA | 1328 |
| | | | | | CACACAAA | |
| 53335_I2_98 | BCL11a | Intron 2 | + | chr2: 60495742-60495767 | UCAGCACAUACACACAA | 1329 |
| | | | | | AAGGUACC | |
| 53335_I2_99 | BCL11a | Intron 2 | + | chr2: 60495775-60495800 | UGUAAUUCUUUUCCUGC | 1330 |
| | | | | | UCAAAGAC | |
| 53335_I2_100 | BCL11a | Intron 2 | + | chr2: 60495820-60495845 | CCCCAACCAAAAACCCUU | 1331 |
| | | | | | GCCACCA | |
| 53335_I2_101 | BCL11a | Intron 2 | + | chr2: 60495821-60495846 | CCCAACCAAAAACCCUU | 1332 |
| | | | | | GCCACCAU | |
| 53335_I2_102 | BCL11a | Intron 2 | + | chr2: 60495828-60495853 | AAAAACCCUUGCCACCA | 1333 |
| | | | | | UGGGAGCC | |
| 53335_I2_103 | BCL11a | Intron 2 | + | chr2: 60495829-60495854 | AAAACCCUUGCCACCAU | 1334 |
| | | | | | GGGAGCCU | |
| 53335_I2_104 | BCL11a | Intron 2 | + | chr2: 60495830-60495855 | AAACCCUUGCCACCAUG | 1335 |
| | | | | | GGAGCCUG | |
| 53335_I2_105 | BCL11a | Intron 2 | + | chr2: 60495839-60495864 | CCACCAUGGGAGCCUGG | 1336 |
| | | | | | GGCAGAGA | |
| 53335_I2_106 | BCL11a | Intron 2 | + | chr2: 60495867-60495892 | CACAGUGAAGUCAAACU | 1337 |
| | | | | | GUAAUUCC | |
| 53335_I2_107 | BCL11a | Intron 2 | + | chr2: 60495877-60495902 | UCAAACUGUAAUUCCAG | 1338 |
| | | | | | GCUCUAAA | |
| 53335_I2_108 | BCL11a | Intron 2 | + | chr2: 60495913-60495938 | UUUUUCUGAGAGUCUCU | 1339 |
| | | | | | AAAUUACA | |
| 53335_I2_109 | BCL11a | Intron 2 | + | chr2: 60495914-60495939 | UUUUCUGAGAGUCUCUA | 1340 |
| | | | | | AAUUACAA | |
| 53335_I2_110 | BCL11a | Intron 2 | + | chr2: 60495972-60495997 | ACACCUAAGAAACAUAC | 1341 |
| | | | | | UGCAGCUC | |
| 53335_I2_111 | BCL11a | Intron 2 | + | chr2: 60496001-60496026 | AAAGAGAACAAACAAAC | 1342 |
| | | | | | CAAAGAGA | |
| 53335_I2_112 | BCL11a | Intron 2 | + | chr2: 60496002-60496027 | AAGAGAACAAACAAACC | 1343 |
| | | | | | AAAGAGAA | |
| 53335_I2_113 | BCL11a | Intron 2 | + | chr2: 60496011-60496036 | AACAAACCAAAGAGAAG | 1344 |
| | | | | | GGAUCCAG | |
| 53335_I2_114 | BCL11a | Intron 2 | + | chr2: 60496048-60496073 | UAUGUGAAAAGUCAAUU | 1345 |
| | | | | | GAUAAUGA | |
| 53335_I2_115 | BCL11a | Intron 2 | + | chr2: 60496055-60496080 | AAAGUCAAUUGAUAAUG | 1346 |
| | | | | | AAGGCUUU | |
| 53335_I2_116 | BCL11a | Intron 2 | + | chr2: 60496063-60496088 | UUGAUAAUGAAGGCUUU | 1347 |
| | | | | | AGGAUAAC | |
| 53335_I2_117 | BCL11a | Intron 2 | + | chr2: 60496066-60496091 | AUAAUGAAGGCUUUAGG | 1348 |
| | | | | | AUAACCGG | |
| 53335_I2_118 | BCL11a | Intron 2 | + | chr2: 60496067-60496092 | UAAUGAAGGCUUUAGGA | 1349 |
| | | | | | UAACCGGA | |
| 53335_I2_119 | BCL11a | Intron 2 | + | chr2: 60496068-60496093 | AAUGAAGGCUUUAGGAU | 1350 |
| | | | | | AACCGGAG | |
| 53335_I2_120 | BCL11a | Intron 2 | + | chr2: 60496098-60496123 | AUGAUUGAAAGCAAUGC | 1351 |
| | | | | | ACCUGUGC | |
| 53335_I2_121 | BCL11a | Intron 2 | + | chr2: 60496104-60496129 | GAAAGCAAUGCACCUGU | 1352 |
| | | | | | GCAGGAAA | |
| 53335_I2_122 | BCL11a | Intron 2 | + | chr2: 60496111-60496136 | AUGCACCUGUGCAGGAA | 1353 |
| | | | | | AUGGAUUA | |
| 53335_I2_123 | BCL11a | Intron 2 | + | chr2: 60496118-60496143 | UGUGCAGGAAAUGGAUU | 1354 |
| | | | | | ACGGAAAC | |
| 53335_I2_124 | BCL11a | Intron 2 | + | chr2: 60496119-60496144 | GUGCAGGAAAUGGAUUA | 1355 |
| | | | | | CGGAAACA | |
| 53335_I2_125 | BCL11a | Intron 2 | + | chr2: 60496153-60496178 | UCAUGAAAUCCCAGAAA | 1356 |
| | | | | | ACCAGAAC | |
| 53335_I2_126 | BCL11a | Intron 2 | + | chr2: 60496154-60496179 | CAUGAAAUCCCAGAAAA | 1357 |
| | | | | | CCAGAACC | |
| 53335_I2_127 | BCL11a | Intron 2 | + | chr2: 60496164-60496189 | CAGAAAACCAGAACCGG | 1358 |
| | | | | | GAAAGUUC | |
| 53335_I2_128 | BCL11a | Intron 2 | + | chr2: 60496171-60496196 | CCAGAACCGGGAAAGUU | 1359 |
| | | | | | CUGGAAGU | |
| 53335_I2_129 | BCL11a | Intron 2 | + | chr2: 60496198-60496223 | GAAAAACAAAUCAUGAC | 1360 |
| | | | | | UUAAGCAA | |
| 53335_I2_130 | BCL11a | Intron 2 | + | chr2: 60496238-60496263 | CGUUUACAGAAUGCCUU | 1361 |
| | | | | | GUCCCACG | |
| 53335_I2_131 | BCL11a | Intron 2 | − | chr2: 60494308-60494333 | AGGCCAUGGUCACUGCC | 1362 |
| | | | | | CAGUUUAG | |
| 53335_I2_132 | BCL11a | Intron 2 | − | chr2: 60494327-60494352 | CCAGAGUGGGGAGGUGA | 1363 |
| | | | | | CCAGGCCA | |
| 53335_I2_133 | BCL11a | Intron 2 | − | chr2: 60494333-60494358 | CCAGGUCCAGAGUGGGG | 1364 |
| | | | | | AGGUGACC | |
| 53335_I2_134 | BCL11a | Intron 2 | − | chr2: 60494341-60494366 | GGGGCAACCCAGGUCCA | 1365 |
| | | | | | GAGUGGGG | |
| 53335_I2_135 | BCL11a | Intron 2 | − | chr2: 60494344-60494369 | AGAGGGGCAACCCAGGU | 1366 |
| | | | | | CCAGAGUG | |
| 53335_I2_136 | BCL11a | Intron 2 | − | chr2: 60494345-60494370 | CAGAGGGGCAACCCAGG | 1367 |
| | | | | | UCCAGAGU | |
| 53335_I2_137 | BCL11a | Intron 2 | − | chr2: 60494346-60494371 | ACAGAGGGGCAACCCAG | 1368 |
| | | | | | GUCCAGAG | |
| 53335_I2_138 | BCL11a | Intron 2 | − | chr2: 60494356-60494381 | CUCCUUGUUUACAGAGG | 1369 |
| | | | | | GGCAACCC | |
| 53335_I2_139 | BCL11a | Intron 2 | − | chr2: 60494365-60494390 | UAUUACAACCUCCUUGU | 1370 |
| | | | | | UUACAGAG | |
| 53335_I2_140 | BCL11a | Intron 2 | − | chr2: 60494366-60494391 | UUAUUACAACCUCCUUG | 1371 |
| | | | | | UUUACAGA | |
| 53335_I2_141 | BCL11a | Intron 2 | − | chr2: 60494367-60494392 | UUUAUUACAACCUCCUU | 1372 |
| | | | | | GUUUACAG | |
| 53335_I2_142 | BCL11a | Intron 2 | − | chr2: 60494401-60494426 | UAAGAUUUAUAAGACAU | 1373 |
| | | | | | UAGGGUAU | |
| 53335_I2_143 | BCL11a | Intron 2 | − | chr2: 60494407-60494432 | AUUGCAUAAGAUUUAUA | 1374 |
| | | | | | AGACAUUA | |
| 53335_I2_144 | BCL11a | Intron 2 | − | chr2: 60494408-60494433 | AAUUGCAUAAGAUUUAU | 1375 |
| | | | | | AAGACAUU | |
| 53335_I2_145 | BCL11a | Intron 2 | − | chr2: 60494440-60494465 | CUCUUCUCUCCCCAUACU | 1376 |
| | | | | | CCCAUCU | |
| 53335_I2_146 | BCL11a | Intron 2 | − | chr2: 60494477-60494502 | UUGAUAUCUCAUCUCAC | 1377 |
| | | | | | UGAGCUCU | |
| 53335_I2_147 | BCL11a | Intron 2 | − | chr2: 60494478-60494503 | UUUGAUAUCUCAUCUCA | 1378 |
| | | | | | CUGAGCUC | |
| 53335_I2_148 | BCL11a | Intron 2 | − | chr2: 60494526-60494551 | CUUUGCCAAUUGGAGAU | 1379 |
| | | | | | UAGGGAGA | |
| 53335_I2_149 | BCL11a | Intron 2 | − | chr2: 60494532-60494557 | GUCUGGCUUUGCCAAUU | 1380 |
| | | | | | GGAGAUUA | |
| 53335_I2_150 | BCL11a | Intron 2 | − | chr2: 60494533-60494558 | AGUCUGGCUUUGCCAAU | 1381 |
| | | | | | UGGAGAUU | |
| 53335_I2_151 | BCL11a | Intron 2 | − | chr2: 60494541-60494566 | UUGCCCCAAGUCUGGCU | 1382 |
| | | | | | UUGCCAAU | |
| 53335_I2_152 | BCL11a | Intron 2 | − | chr2: 60494554-60494579 | GAACCAGUCUGUAUUGC | 1383 |
| | | | | | CCCAAGUC | |
| 53335_I2_153 | BCL11a | Intron 2 | − | chr2: 60494599-60494624 | GGUGAUAAAUCAUUAGG | 1384 |
| | | | | | AAUGAGCU | |
| 53335_I2_154 | BCL11a | Intron 2 | − | chr2: 60494610-60494635 | AAAGAACAUUUGGUGAU | 1385 |
| | | | | | AAAUCAUU | |
| 53335_I2_155 | BCL11a | Intron 2 | − | chr2: 60494625-60494650 | AAAUUCCAGCUGAAGAA | 1386 |
| | | | | | AGAACAUU | |
| 53335_I2_156 | BCL11a | Intron 2 | − | chr2: 60494668-60494693 | AUAUACUAUUAUUAUUC | 1387 |
| | | | | | CUAUUUUA | |
| 53335_I2_157 | BCL11a | Intron 2 | − | chr2: 60494745-60494770 | AAGCUCGGAGCACUUAC | 1388 |
| | | | | | UCUGCUCU | |
| 53335_I2_158 | BCL11a | Intron 2 | − | chr2: 60494765-60494790 | GAGGCAGCAUUUUAGUU | 1389 |
| | | | | | CACAAGCU | |
| 53335_I2_159 | BCL11a | Intron 2 | − | chr2: 60494789-60494814 | UGAGGUGUAACUAAUAA | 1390 |
| | | | | | AUACCAGG | |
| 53335_I2_160 | BCL11a | Intron 2 | − | chr2: 60494792-60494817 | UGCUGAGGUGUAACUAA | 1391 |
| | | | | | UAAAUACC | |
| 53335_I2_161 | BCL11a | Intron 2 | − | chr2: 60494812-60494837 | GGGCCUGAUAACUUUGU | 1392 |
| | | | | | UUCUGCUG | |
| 53335_I2_162 | BCL11a | Intron 2 | − | chr2: 60494837-60494862 | UGACCCAAACUAGGAAU | 1393 |
| | | | | | UGGGGAAA | |
| 53335_I2_163 | BCL11a | Intron 2 | − | chr2: 60494838-60494863 | CUGACCCAAACUAGGAA | 1394 |
| | | | | | UUGGGGAA | |
| 53335_I2_164 | BCL11a | Intron 2 | − | chr2: 60494843-60494868 | UUCUUCUGACCCAAACU | 1395 |
| | | | | | AGGAAUUG | |
| 53335_I2_165 | BCL11a | Intron 2 | − | chr2: 60494844-60494869 | UUUCUUCUGACCCAAAC | 1396 |
| | | | | | UAGGAAUU | |
| 53335_I2_166 | BCL11a | Intron 2 | − | chr2: 60494845-60494870 | UUUUCUUCUGACCCAAA | 1397 |
| | | | | | CUAGGAAU | |
| 53335_I2_167 | BCL11a | Intron 2 | − | chr2: 60494851-60494876 | UUUCCCUUUUCUUCUGA | 1398 |
| | | | | | CCCAAACU | |
| 53335_I2_168 | BCL11a | Intron 2 | − | chr2: 60494942-60494967 | CCUAUCAGGUACCAGCU | 1399 |
| | | | | | ACUGUGUU | |
| 53335_I2_169 | BCL11a | Intron 2 | − | chr2: 60494961-60494986 | CAUCCAUCACAUAUAGG | 1400 |
| | | | | | CACCUAUC | |
| 53335_I2_170 | BCL11a | Intron 2 | − | chr2: 60494972-60494997 | GGCUGUCCACCCAUCCA | 1401 |
| | | | | | UCACAUAU | |
| 53335_I2_171 | BCL11a | Intron 2 | − | chr2: 60494998-60495023 | CAUAAUUGUCCAUUUUU | 1402 |
| | | | | | CAUCUGUC | |
| 53335_I2_172 | BCL11a | Intron 2 | − | chr2: 60494999-60495024 | UCAUAAUUGUCCAUUUU | 1403 |
| | | | | | UCAUCUGU | |
| 53335_I2_173 | BCL11a | Intron 2 | − | chr2: 60495058-60495083 | GUGUGGACUCCCAAAAU | 1404 |
| | | | | | UGUAAAGG | |
| 53335_I2_174 | BCL11a | Intron 2 | − | chr2: 60495061-60495086 | GCCGUGUGGACUCCCAA | 1405 |
| | | | | | AAUUGUAA | |
| 53335_I2_175 | BCL11a | Intron 2 | − | chr2: 60495080-60495105 | GAAAUAAUUUGUAUGCC | 1406 |
| | | | | | AUGCCGUG | |
| 53335_I2_176 | BCL11a | Intron 2 | − | chr2: 60495111-60495136 | GGAGAAUUGGAUUUUAU | 1407 |
| | | | | | UUCUCAAU | |
| 53335_I2_177 | BCL11a | Intron 2 | − | chr2: 60495112-60495137 | UGGAGAAUUGGAUUUUA | 1408 |
| | | | | | UUUCUCAA | |
| 53335_I2_178 | BCL11a | Intron 2 | − | chr2: 60495129-60495154 | GAAGGCUCUCUUGGUGA | 1409 |
| | | | | | UGGAGAAU | |
| 53335_I2_179 | BCL11a | Intron 2 | − | chr2: 60495137-60495162 | CUCUUUCGGAAGGCUCU | 1410 |
| | | | | | CUUGGUGA | |
| 53335_I2_180 | BCL11a | Intron 2 | − | chr2: 60495143-60495168 | GGGGGCCUCUUUCGGAA | 1411 |
| | | | | | GGCUCUCU | |
| 53335_I2_181 | BCL11a | Intron 2 | − | chr2: 60495152-60495177 | UUUGCCCAGGGGGGCCU | 1412 |
| | | | | | CUUUCGGA | |
| 53335_I2_182 | BCL11a | Intron 2 | − | chr2: 60495156-60495181 | GCCGUUUGCCCAGGGGG | 1413 |
| | | | | | GCCUCUUU | |
| 53335_I2_183 | BCL11a | Intron 2 | − | chr2: 60495166-60495191 | UCCAUCGGUGGCCGUUU | 1414 |
| | | | | | GCCCAGGG | |
| 53335_I2_184 | BCL11a | Intron 2 | − | chr2: 60495167-60495192 | CUCCAUCGGUGGCCGUU | 1415 |
| | | | | | UGCCCAGG | |
| 53335_I2_185 | BCL11a | Intron 2 | − | chr2: 60495168-60495193 | UCUCCAUCGGUGGCCGU | 1416 |
| | | | | | UUGCCCAG | |
| 53335_I2_186 | BCL11a | Intron 2 | − | chr2: 60495169-60495194 | CUCUCCAUCGGUGGCCG | 1417 |
| | | | | | UUUGCCCA | |
| 53335_I2_187 | BCL11a | Intron 2 | − | chr2: 60495170-60495195 | CCUCUCCAUCGGUGGCC | 1418 |
| | | | | | GUUUGCCC | |
| 53335_I2_188 | BCL11a | Intron 2 | − | chr2: 60495183-60495208 | GAGGACUGGCAGACCUC | 1419 |
| | | | | | UCCAUCGG | |
| 53335_I2_189 | BCL11a | Intron 2 | − | chr2: 60495186-60495211 | GAAGAGGACUGGCAGAC | 1420 |
| | | | | | CUCUCCAU | |
| 53335_I2_190 | BCL11a | Intron 2 | − | chr2: 60495202-60495227 | GGGCGUGGGUGGGGUAG | 1421 |
| | | | | | AAGAGGAC | |
| 53335_I2_191 | BCL11a | Intron 2 | − | chr2: 60495207-60495232 | GGUGGGGGCGUGGGUGG | 1422 |
| | | | | | GGUAGAAG | |
| 53335_I2_192 | BCL11a | Intron 2 | − | chr2: 60495216-60495241 | UCUGAUUAGGGUGGGGG | 1423 |
| | | | | | CGUGGGUG | |
| 53335_I2_193 | BCL11a | Intron 2 | − | chr2: 60495217-60495242 | CUCUGAUUAGGGUGGGG | 1424 |
| | | | | | GCGUGGGU | |
| 53335_I2_194 | BCL11a | Intron 2 | − | chr2: 60495218-60495243 | CCUCUGAUUAGGGUGGG | 1425 |
| | | | | | GGCGUGGG | |
| 53335_I2_195 | BCL11a | Intron 2 | − | chr2: 60495221-60495246 | UGGCCUCUGAUUAGGGU | 1426 |
| | | | | | GGGGGCGU | |
| 53335_I2_196 | BCL11a | Intron 2 | − | chr2: 60495222-60495247 | UUGGCCUCUGAUUAGGG | 1427 |
| | | | | | UGGGGGCG | |
| 53335_I2_197 | BCL11a | Intron 2 | − | chr2: 60495227-60495252 | AGGGUUUGGCCUCUGAU | 1428 |
| | | | | | UAGGGUGG | |
| 53335_I2_198 | BCL11a | Intron 2 | − | chr2: 60495228-60495253 | AAGGGUUUGGCCUCUGA | 1429 |
| | | | | | UUAGGGUG | |
| 53335_I2_199 | BCL11a | Intron 2 | − | chr2: 60495229-60495254 | GAAGGGUUUGGCCUCUG | 1430 |
| | | | | | AUUAGGGU | |
| 53335_I2_200 | BCL11a | Intron 2 | − | chr2: 60495230-60495255 | GGAAGGGUUUGGCCUCU | 1431 |
| | | | | | GAUUAGGG | |
| 53335_I2_201 | BCL11a | Intron 2 | − | chr2: 60495233-60495258 | CCAGGAAGGGUUUGGCC | 1432 |
| | | | | | UCUGAUUA | |
| 53335_I2_202 | BCL11a | Intron 2 | − | chr2: 60495234-60495259 | UCCAGGAAGGGUUUGGC | 1433 |
| | | | | | CUCUGAUU | |
| 53335_I2_203 | BCL11a | Intron 2 | − | chr2: 60495246-60495271 | UUUAUCACAGGCUCCAG | 1434 |
| | | | | | GAAGGGUU | |
| 53335_I2_204 | BCL11a | Intron 2 | − | chr2: 60495251-60495276 | UUGCUUUUAUCACAGGC | 1435 |
| | | | | | UCCAGGAA | |
| 53335_I2_205 | BCL11a | Intron 2 | − | chr2: 60495252-60495277 | GUUGCUUUUAUCACAGG | 1436 |
| | | | | | CUCCAGGA | |
| 53335_I2_206 | BCL11a | Intron 2 | − | chr2: 60495256-60495281 | AACAGUUGCUUUUAUCA | 1437 |
| | | | | | CAGGCUCC | |
| 53335_I2_207 | BCL11a | Intron 2 | − | chr2: 60495263-60495288 | GCAAGCUAACAGUUGCU | 1438 |
| | | | | | UUUAUCAC | |
| 53335_I2_208 | BCL11a | Intron 2 | − | chr2: 60495318-60495343 | AUCUACUCUUAGACAUA | 1439 |
| | | | | | ACACACCA | |
| 53335_I2_209 | BCL11a | Intron 2 | − | chr2: 60495319-60495344 | CAUCUACUCUUAGACAU | 1440 |
| | | | | | AACACACC | |
| 53335_I2_210 | BCL11a | Intron 2 | − | chr2: 60495347-60495372 | AAUAACAUAGGCCAGAA | 1441 |
| | | | | | AAGAGAUA | |
| 53335_I2_211 | BCL11a | Intron 2 | − | chr2: 60495364-60495389 | GCAAAGUCCAUACAGGU | 1442 |
| | | | | | AAUAACAU | |
| 53335_I2_212 | BCL11a | Intron 2 | − | chr2: 60495376-60495401 | GCUGAUUCCAGUGCAAA | 1443 |
| | | | | | GUCCAUAC | |
| 53335_I2_213 | BCL11a | Intron 2 | − | chr2: 60495426-60495451 | CGAUACAGGGCUGGCUC | 1444 |
| | | | | | UAUGCCCC | |
| 53335_I2_214 | BCL11a | Intron 2 | − | chr2: 60495440-60495465 | AGAUGGCUGAAAAGCGA | 1445 |
| | | | | | UACAGGGC | |
| 53335_I2_215 | BCL11a | Intron 2 | − | chr2: 60495444-60495469 | AGUGAGAUGGCUGAAAA | 1446 |
| | | | | | GCGAUACA | |
| 53335_I2_216 | BCL11a | Intron 2 | − | chr2: 60495445-60495470 | UAGUGAGAUGGCUGAAA | 1447 |
| | | | | | AGCGAUAC | |
| 53335_I2_217 | BCL11a | Intron 2 | − | chr2: 60495462-60495487 | GACUUGGGAGUUAUCUG | 1448 |
| | | | | | UAGUGAGA | |
| 53335_I2_218 | BCL11a | Intron 2 | − | chr2: 60495482-60495507 | UAAGGAAGGCAGCUAGA | 1449 |
| | | | | | CAGGACUU | |
| 53335_I2_219 | BCL11a | Intron 2 | − | chr2: 60495483-60495508 | AUAAGGAAGGCAGCUAG | 1450 |
| | | | | | ACAGGACU | |
| 53335_I2_220 | BCL11a | Intron 2 | − | chr2: 60495489-60495514 | CCUGUGAUAAGGAAGGC | 1451 |
| | | | | | AGCUAGAC | |
| 53335_I2_221 | BCL11a | Intron 2 | − | chr2: 60495501-60495526 | UUGGGUGCUAUUCCUGU | 1452 |
| | | | | | GAUAAGGA | |
| 53335_I2_222 | BCL11a | Intron 2 | − | chr2: 60495505-60495530 | GACCUUGGGUGCUAUUC | 1453 |
| | | | | | CUGUGAUA | |
| 53335_I2_223 | BCL11a | Intron 2 | − | chr2: 60495524-60495549 | CUACUCUGAGGUACUGA | 1454 |
| | | | | | UGGACCUU | |
| 53335_I2_224 | BCL11a | Intron 2 | − | chr2: 60495525-60495550 | UCUACUCUGAGGUACUG | 1455 |
| | | | | | AUGGACCU | |
| 53335_I2_225 | BCL11a | Intron 2 | − | chr2: 60495532-60495557 | AGGGGGUUCUACUCUGA | 1456 |
| | | | | | GGUACUGA | |
| 53335_I2_226 | BCL11a | Intron 2 | − | chr2: 60495541-60495566 | CUAGUUUAUAGGGGGUU | 1457 |
| | | | | | CUACUCUG | |
| 53335_I2_227 | BCL11a | Intron 2 | − | chr2: 60495554-60495579 | UGGGCAAACCAGACUAG | 1458 |
| | | | | | UUUAUAGG | |
| 53335_I2_228 | BCL11a | Intron 2 | − | chr2: 60495555-60495580 | AUGGGCAAACCAGACUA | 1459 |
| | | | | | GUUUAUAG | |
| 53335_I2_229 | BCL11a | Intron 2 | − | chr2: 60495556-60495581 | CAUGGGCAAACCAGACU | 1460 |
| | | | | | AGUUUAUA | |
| 53335_I2_230 | BCL11a | Intron 2 | − | chr2: 60495557-60495582 | CCAUGGGCAAACCAGAC | 1461 |
| | | | | | UAGUUUAU | |
| 53335_I2_231 | BCL11a | Intron 2 | − | chr2: 60495578-60495603 | GGAAAACAGCCUGACUG | 1462 |
| | | | | | UGCCCCAU | |
| 53335_I2_232 | BCL11a | Intron 2 | − | chr2: 60495579-60495604 | UGGAAAACAGCCUGACU | 1463 |
| | | | | | GUGCCCCA | |
| 53335_I2_233 | BCL11a | Intron 2 | − | chr2: 60495604-60495629 | GGCAGAGAAUGUCUGCA | 1464 |
| | | | | | CCCCACCC | |
| 53335_I2_234 | BCL11a | Intron 2 | − | chr2: 60495630-60495655 | UGACGUUAUAUGUAAGC | 1465 |
| | | | | | AUCACAAC | |
| 53335_I2_235 | BCL11a | Intron 2 | − | chr2: 60495684-60495709 | GGAAGCUCCAAACUCUC | 1466 |
| | | | | | AAACCACA | |
| 53335_I2_236 | BCL11a | Intron 2 | − | chr2: 60495685-60495710 | GGGAAGCUCCAAACUCU | 1467 |
| | | | | | CAAACCAC | |
| 53335_I2_237 | BCL11a | Intron 2 | − | chr2: 60495710-60495735 | CCCAUUGAGAAUAUUUU | 1468 |
| | | | | | GACUUUUA | |
| 53335_I2_238 | BCL11a | Intron 2 | − | chr2: 60495711-60495736 | GCCCAUUGAGAAUAUUU | 1469 |
| | | | | | UGACUUUU | |
| 53335_I2_239 | BCL11a | Intron 2 | − | chr2: 60495738-60495763 | CCUUUUGUGUGUAUGUG | 1470 |
| | | | | | CUGAUUGA | |
| 53335_I2_240 | BCL11a | Intron 2 | − | chr2: 60495739-60495764 | ACCUUUUGUGUGUAUGU | 1471 |
| | | | | | GCUGAUUG | |
| 53335_I2_241 | BCL11a | Intron 2 | − | chr2: 60495768-60495793 | AGCAGGAAAAGAAUUAC | 1472 |
| | | | | | AGUUUUCC | |
| 53335_I2_242 | BCL11a | Intron 2 | − | chr2: 60495790-60495815 | GGUAUUGAAUUGCCUGU | 1473 |
| | | | | | CUUUGAGC | |
| 53335_I2_243 | BCL11a | Intron 2 | − | chr2: 60495816-60495841 | GGCAAGGGUUUUUGGUU | 1474 |
| | | | | | GGGGGAAG | |
| 53335_I2_244 | BCL11a | Intron 2 | − | chr2: 60495817-60495842 | UGGCAAGGGUUUUUGGU | 1475 |
| | | | | | UGGGGGAA | |
| 53335_I2_245 | BCL11a | Intron 2 | − | chr2: 60495818-60495843 | GUGGCAAGGGUUUUUGG | 1476 |
| | | | | | UUGGGGGA | |
| 53335_I2_246 | BCL11a | Intron 2 | − | chr2: 60495822-60495847 | CAUGGUGGCAAGGGUUU | 1477 |
| | | | | | UUGGUUGG | |
| 53335_I2_247 | BCL11a | Intron 2 | − | chr2: 60495823-60495848 | CCAUGGUGGCAAGGGUU | 1478 |
| | | | | | UUUGGUUG | |
| 53335_I2_248 | BCL11a | Intron 2 | − | chr2: 60495824-60495849 | CCCAUGGUGGCAAGGGU | 1479 |
| | | | | | UUUUGGUU | |
| 53335_I2_249 | BCL11a | Intron 2 | − | chr2: 60495825-60495850 | UCCCAUGGUGGCAAGGG | 1480 |
| | | | | | UUUUUGGU | |
| 53335_I2_250 | BCL11a | Intron 2 | − | chr2: 60495829-60495854 | AGGCUCCCAUGGUGGCA | 1481 |
| | | | | | AGGGUUUU | |
| 53335_I2_251 | BCL11a | Intron 2 | − | chr2: 60495836-60495861 | CUGCCCCAGGCUCCCAUG | 1482 |
| | | | | | GUGGCAA | |
| 53335_I2_252 | BCL11a | Intron 2 | − | chr2: 60495837-60495862 | UCUGCCCCAGGCUCCCAU | 1483 |
| | | | | | GGUGGCA | |
| 53335_I2_253 | BCL11a | Intron 2 | − | chr2: 60495842-60495867 | CCUUCUCUGCCCCAGGCU | 1484 |
| | | | | | CCCAUGG | |
| 53335_I2_254 | BCL11a | Intron 2 | − | chr2: 60495845-60495870 | GUGCCUUCUCUGCCCCA | 1485 |
| | | | | | GGCUCCCA | |
| 53335_I2_255 | BCL11a | Intron 2 | − | chr2: 60495854-60495879 | GACUUCACUGUGCCUUC | 1486 |
| | | | | | UCUGCCCC | |
| 53335_I2_256 | BCL11a | Intron 2 | − | chr2: 60495893-60495918 | AAAAAUGACAGCACCAU | 1487 |
| | | | | | UUAGAGCC | |
| 53335_I2_257 | BCL11a | Intron 2 | − | chr2: 60495978-60496003 | UUUCCAGAGCUGCAGUA | 1488 |
| | | | | | UGUUUCUU | |
| 53335_I2_258 | BCL11a | Intron 2 | − | chr2: 60496020-60496045 | GGGUGACCUCUGGAUCC | 1489 |
| | | | | | CUUCUCUU | |
| 53335_I2_259 | BCL11a | Intron 2 | − | chr2: 60496035-60496060 | ACUUUUCACAUAUGAGG | 1490 |
| | | | | | GUGACCUC | |
| 53335_I2_260 | BCL11a | Intron 2 | − | chr2: 60496045-60496070 | UUAUCAAUUGACUUUUC | 1491 |
| | | | | | ACAUAUGA | |
| 53335_I2_261 | BCL11a | Intron 2 | − | chr2: 60496046-60496071 | AUUAUCAAUUGACUUUU | 1492 |
| | | | | | CACAUAUG | |
| 53335_I2_262 | BCL11a | Intron 2 | − | chr2: 60496090-60496115 | GCAUUGCUUUCAAUCAU | 1493 |
| | | | | | CUCCCCUC | |
| 53335_I2_263 | BCL11a | Intron 2 | − | chr2: 60496119-60496144 | UGUUUCCGUAAUCCAUU | 1494 |
| | | | | | UCCUGCAC | |
| 53335_I2_264 | BCL11a | Intron 2 | − | chr2: 60496165-60496190 | AGAACUUUCCCGGUUCU | 1495 |
| | | | | | GGUUUUCU | |
| 53335_I2_265 | BCL11a | Intron 2 | − | chr2: 60496166-60496191 | CAGAACUUUCCCGGUUC | 1496 |
| | | | | | UGGUUUUC | |
| 53335_I2_266 | BCL11a | Intron 2 | − | chr2: 60496174-60496199 | CCGACUUCCAGAACUUU | 1497 |
| | | | | | CCCGGUUC | |
| 53335_I2_267 | BCL11a | Intron 2 | − | chr2: 60496180-60496205 | GUUUUUCCGACUUCCAG | 1498 |
| | | | | | AACUUUCC | |
| 53335_I2_268 | BCL11a | Intron 2 | − | chr2: 60496233-60496258 | GACAAGGCAUUCUGUAA | 1499 |
| | | | | | ACGUGUAU | |

[0459] In embodiments, the gRNA targeting domain consists of the 20 3′ nt of any one of the sequences in the table above.

[0460] Exemplary preferred gRNA targeting domains useful in the compositions and methods of the invention are described in the tables below.

TABLE 5
Preferred Guide RNA Targeting Domains Directed
to Coding Regions of the BCL11a Gene

| | | | | SEQ ID |
|---|---|---|---|---|
| Id. | Target | gRNA Targeting Domain | Targeting Site (Chr2) | NO: |
| CR000044 | BCL11a | ACAGGCCGUGAACCUAAGUG | 60678414-60678436 | 1 |
| CR000056 | BCL11a | UAGAGGGGGGAAAUUAUAGG | 60678685-60678707 | 2 |
| CR000068 | BCL11a | CGAGCGGUAAAUCCUAAAGA | 60678840-60678862 | 3 |
| CR000079 | BCL11a | AGACAAAUUCAAAUCCUGCA | 60678895-60678917 | 4 |
| CR000091 | BCL11a | GCUUUUGGUGGCUACCAUGC | 60678909-60678931 | 5 |
| CR000102 | BCL11a | AAUUUAUGCCAUCUGAUAAG | 60679112-60679134 | 6 |
| CR000033 | BCL11a | UGUUCCUCCUACCCACCCGA | 60679178-60679200 | 7 |
| CR000045 | BCL11a | AUAAAUGUUGGAGCUUUAGG | 60679288-60679310 | 8 |
| CR000069 | BCL11a | CAACCUAAUUACCUGUAUUG | 60679389-60679411 | 9 |
| CR000080 | BCL11a | CGCUGUCAUGAGUGAUGCCC | 60679428-60679450 | 10 |
| CR000092 | BCL11a | GGCAUCACUCAUGACAGCGA | 60679432-60679454 | 11 |
| CR000103 | BCL11a | AGUCCCAUAGAGAGGGCCCG | 60679456-60679478 | 12 |
| CR000115 | BCL11a | ACUGAUUCACUGUUCCAAUG | 60679476-60679498 | 13 |
| CR000034 | BCL11a | AGGACUCUGUCUUCGCACAA | 60679577-60679599 | 14 |
| CR000058 | BCL11a | CCACGCUGACGUCGACUGGG | 60679650-60679672 | 15 |
| CR000070 | BCL11a | GUUCUUCACACACCCCCAUU | 60679779-60679801 | 16 |
| CR000081 | BCL11a | GCGCUUCUCCACACCGCCCG | 60687934-60687956 | 17 |
| CR000093 | BCL11a | GUCUGGAGUCUCCGAAGCUA | 60688006-60688028 | 18 |
| CR000116 | BCL11a | AAAGAUCCCUUCCUUAGCUU | 60688017-60688039 | 19 |
| CR000035 | BCL11a | UCGCCGGCUACGCGGCCUCC | 60688046-60688068 | 20 |
| CR000047 | BCL11a | CGGAGAACGUGUACUCGCAG | 60688070-60688092 | 21 |
| CR000071 | BCL11a | GAGCUUGAUGCGCUUAGAGA | 60688133-60688155 | 22 |
| CR000082 | BCL11a | CCCCCCGAGGCCGACUCGCC | 60688200-60688222 | 23 |
| CR000094 | BCL11a | CACCAUGCCCUGCAUGACGU | 60688394-60688416 | 24 |
| CR000105 | BCL11a | GAGAGCGAGAGGGUGGACUA | 60688506-60688528 | 25 |
| CR000117 | BCL11a | CACGGACUUGAGCGCGCUGC | 60688649-60688671 | 26 |
| CR000036 | BCL11a | GCCCACCAAGUCGCUGGUGC | 60688676-60688698 | 27 |
| CR000048 | BCL11a | CCCACCAAGUCGCUGGUGCC | 60688677-60688699 | 28 |
| CR000060 | BCL11a | GGCGGUGGAGAGACCGUCGU | 60688712-60688734 | 29 |
| CR000072 | BCL11a | GCCGCAGAACUCGCAUGACU | 60688898-60688920 | 30 |
| CR000083 | BCL11a | CCGCCCCCAGGCGCUCUAUG | 60689194-60689216 | 31 |
| CR000095 | BCL11a | UGGGGGUCCAAGUGAUGUCU | 60689217-60689239 | 32 |
| CR000106 | BCL11a | CUCAACUUACAAAUACCCUG | 60695857-60695879 | 33 |
| CR000118 | BCL11a | AGUGCAGAAUAUGCCCCGCA | 60695872-60695894 | 34 |
| CR000037 | BCL11a | GCAUAUUCUGCACUCAUCCC | 60695881-60695903 | 35 |
| CR000049 | BCL11a | GAGCUCUAAUCCCCACGCCU | 60695898-60695920 | 36 |
| CR000061 | BCL11a | AGAGCUCCAUGUGCAGAACG | 60695914-60695936 | 37 |
| CR000084 | BCL11a | GAUAAACUUCUGCACUGGAG | 60695947-60695969 | 38 |
| CR000096 | BCL11a | UAGCUGUAGUGCUUGAUUUU | 60695981-60696003 | 39 |
| CR000107 | BCL11a | UAUCCAAAUUCAUACAAUAG | 60716451-60716473 | 40 |
| CR000119 | BCL11a | AUGCCCUGAGUAUCCCAACA | 60717068-60717090 | 41 |
| CR000038 | BCL11a | UAGUAACAGACCCAUGUGCU | 60717232-60717254 | 42 |
| CR000050 | BCL11a | AUACUUCAAGGCCUCAAUGA | 60717661-60717683 | 43 |
| CR000062 | BCL11a | GACUAGGUAGACCUUCAUUG | 60717672-60717694 | 44 |
| CR000073 | BCL11a | CUGAGCUAGUGGGGGCUCUU | 60720773-60720795 | 45 |
| CR000085 | BCL11a | CUGAGCACAUUCUUACGCCU | 60721291-60721313 | 46 |
| CR000097 | BCL11a | UUUAUAAGACAUUAGGGUAt | 60721534-60721556 | 47 |
| CR000108 | BCL11a | UGAUAGGUGCCUAUAUGUGA | 60722096-60722118 | 48 |
| CR000120 | BCL11a | UCCACCCAUCCAUCACAUAU | 60722105-60722127 | 49 |
| CR000039 | BCL11a | CUUCAAAGUUGUAUUGACCC | 60722434-60722456 | 50 |
| CR000051 | BCL11a | AAACCAGACUAGUUUAUAGG | 60722687-60722709 | 51 |
| CR000063 | BCL11a | UUUGAGACAGUUACCCCUUC | 60723706-60723728 | 52 |
| CR000074 | BCL11a | AACCUGAGGGCUAGUUUCUA | 60724541-60724563 | 53 |
| CR000086 | BCL11a | GCCUGGACCCACCGCUUCAU | 60725058-60725080 | 54 |
| CR000109 | BCL11a | AAACCAGUGAGGUCAUCUAU | 60725857-60725879 | 55 |
| CR000121 | BCL11a | ACCUGCUAUGUGUUCCUGUU | 60773104-60773126 | 56 |
| CR000040 | BCL11a | UAGAGGAAUUUGCCCCAAAC | 60773118-60773140 | 57 |
| CR000052 | BCL11a | GAUAAACAAUCGUCAUCCUC | 60773150-60773172 | 58 |
| CR000064 | BCL11a | UGGCAUCCAGGUCACGCCAG | 60773166-60773188 | 59 |
| CR000075 | BCL11a | GACCUGGAUGCCAACCUCCA | 60773176-60773198 | 60 |
| CR000087 | BCL11a | AAAAGCAUCCAAUCCCGUGG | 60773190-60773212 | 61 |
| CR000110 | BCL11a | GAUGCUUUUUUCAUCUCGAU | 60773204-60773226 | 62 |
| CR000122 | BCL11a | CCACAGCUUUUUCUAAGCAG | 60773247-60773269 | 63 |
| CR000041 | BCL11a | CCCCCAAUGGGAAGUUCAUC | 60773316-60773338 | 64 |
| CR000053 | BCL11a | AUCAUGACCUCCUCACCUGU | 60773344-60773366 | 65 |
| CR000065 | BCL11a | AGGAGGUCAUGAUCCCCUUC | 60773354-60773376 | 66 |
| CR000088 | BCL11a | CCCCUUCUGGAGCUCCCAAC | 60773367-60773389 | 67 |
| CR000099 | BCL11a | GCUCCCAACGGGCCGUGGUC | 60773378-60773400 | 68 |
| CR000111 | BCL11a | ACAGAUGAUGAACCAGACCA | 60773390-60773412 | 69 |
| CR000123 | BCL11a | UCUGUAAGAAUGGCUUCAAG | 60773408-60773430 | 70 |
| CR000042 | BCL11a | CAAUUAUUAGAGUGCCAGAG | 60773459-60773481 | 71 |
| CR000054 | BCL11a | GCCUUGCUUGCGGCGAGACA | 60780385-60780407 | 72 |
| CR000066 | BCL11a | ACCAUGUCUCGCCGCAAGCA | 60780386-60780408 | 73 |
| CR000077 | BCL11a | GAGUCUCCUUCUUUCUAACC | 60780482-60780504 | 74 |
| CR000089 | BCL11a | GAAUUGUGGGAGAGCCGUCA | 60780582-60780604 | 75 |
| CR000100 | BCL11a | AAAAUAGAGCGAGAGUGCAC | 60781166-60781188 | 76 |
| CR000112 | BCL11a | GCCCCUGGCGUCCACACGCG | 60781306-60781328 | 77 |
| CR000124 | BCL11a | CUCCUCGUUCUUUAUUCCUC | 60781716-60781738 | 78 |
| CR000043 | BCL11a | GACUGCCCGCGCUUUGUCCU | 60781815-60781837 | 79 |
| CR000055 | BCL11a | UUCCCAGGGACUGGGACUCC | 60781838-60781860 | 80 |
| CR000078 | BCL11a | UGGCUCCUGGGUGUGCGCCU | 60782123-60782145 | 81 |
| CR000090 | BCL11a | UGAAGCCCGCUUUUUGACAG | 60782254-60782276 | 82 |
| CR000101 | BCL11a | AGGGUGGAGACGGGUCGCCA | 60782526-60782548 | 83 |
| CR000113 | BCL11a | GCUCAGGGUCUCGCGGGCCA | 60782543-60782565 | 84 |
| CR000059 | BCL11a | UGAGUCCGAGCAGAAGAAGA | 73160981-73161003 | 85 |

TABLE 6
Preferred Guide RNA Targeting Domains directed to the French HPFH
(French HPFH; Sankaran VG et al. A functional element necessary
for fetal hemoglobin silencing. NEJM (2011) 365: 807-814.)

| | | | | | SEQ |
|---|---|---|---|---|---|
| | Target | | | Genomic Target | ID |
| Id. | Name | Strand | gRNA Targeting Domain | Location | NO: |
| CR001016 | HPFH | − | UCUUAAACCAACCUGCUCAC | chr11: 5234538-5234558 | 86 |
| CR001017 | HPFH | + | CAGGUUGGUUUAAGAUAAGC | chr11: 5234543-5234563 | 87 |
| CR001018 | HPFH | + | AGGUUGGUUUAAGAUAAGCA | chr11: 5234544-5234564 | 88 |
| CR001019 | HPFH | − | UUAAGGGAAUAGUGGAAUGA | chr11: 5234600-5234620 | 89 |
| CR001020 | HPFH | − | AGGGCAAGUUAAGGGAAUAG | chr11: 5234608-5234628 | 90 |
| CR001021 | HPFH | + | CCCUUAACUUGCCCUGAGAU | chr11: 5234613-5234633 | 91 |
| CR001022 | HPFH | − | CCAAUCUCAGGGCAAGUUAA | chr11: 5234616-5234636 | 92 |
| CR001023 | HPFH | − | GCCAAUCUCAGGGCAAGUUA | chr11: 5234617-5234637 | 93 |
| CR001024 | HPFH | − | UGACAGAACAGCCAAUCUCA | chr11: 5234627-5234647 | 94 |
| CR001025 | HPFH | − | AUGACAGAACAGCCAAUCUC | chr11: 5234628-5234648 | 95 |
| CR001026 | HPFH | − | GAGAUAUGUAGAGGAGAACA | chr11: 5234670-5234690 | 96 |
| CR001027 | HPFH | − | GGAGAUAUGUAGAGGAGAAC | chr11: 5234671-5234691 | 97 |
| CR001028 | HPFH | − | UGCGGUGGGGAGAUAUGUAG | chr11: 5234679-5234699 | 98 |
| CR001029 | HPFH | − | CUGCUGAAAGAGAUGCGGUG | chr11: 5234692-5234712 | 99 |
| CR001030 | HPFH | − | ACUGCUGAAAGAGAUGCGGU | chr11: 5234693-5234713 | 100 |
| CR001031 | HPFH | − | AACUGCUGAAAGAGAUGCGG | chr11: 5234694-5234714 | 101 |
| CR001032 | HPFH | − | AACAACUGCUGAAAGAGAUG | chr11: 5234697-5234717 | 102 |
| CR001033 | HPFH | − | UCUGCAAAAAUGAAACUAGG | chr11: 5234731-5234751 | 103 |
| CR001034 | HPFH | − | ACUUCUGCAAAAAUGAAACU | chr11: 5234734-5234754 | 104 |
| CR001035 | HPFH | + | CAUUUUUGCAGAAGUGUUUU | chr11: 5234739-5234759 | 105 |
| CR001036 | HPFH | + | AGUGUUUUAGGCUAAUAUAG | chr11: 5234751-5234771 | 106 |
| CR001037 | HPFH | − | UUGGAGACAAAAAUCUCUAG | chr11: 5234883-5234903 | 107 |
| CR001038 | HPFH | + | UCUAGAGAUUUUUGUCUCCA | chr11: 5234882-5234902 | 108 |
| CR001039 | HPFH | + | CUAGAGAUUUUUGUCUCCAA | chr11: 5234883-5234903 | 109 |
| CR001040 | HPFH | + | GUCUCCAAGGGAAUUUUGAG | chr11: 5234895-5234915 | 110 |
| CR001041 | HPFH | + | CCAAGGGAAUUUUGAGAGGU | chr11: 5234899-5234919 | 111 |
| CR001042 | HPFH | − | CCAACCUCUCAAAAUUCCCU | chr11: 5234902-5234922 | 112 |
| CR001043 | HPFH | + | GGAAUUUUGAGAGGUUGGAA | chr11: 5234904-5234924 | 113 |
| CR001044 | HPFH | + | UGCUUGCUUCCUCCUUCUUU | chr11: 5234953-5234973 | 114 |
| CR001045 | HPFH | − | AAGAAUUUACCAAAAGAAGG | chr11: 5234965-5234985 | 115 |
| CR001046 | HPFH | − | AGGAAGAAUUUACCAAAAGA | chr11: 5234968-5234988 | 116 |
| CR001047 | HPFH | − | AAAAAUUAGAGUUUUAUUAU | chr11: 5234988-5235008 | 117 |
| CR001048 | HPFH | − | UUUUUUAAAUAUUCUUUUAA | Chr11: 5235023-5235045 | 118 |
| CR001049 | HPFH | + | UAUUUACCAGUUAUUGAAAU | chr11: 5235062-5235082 | 119 |
| CR001050 | HPFH | + | CCAGUUAUUGAAAUAGGUUC | chr11: 5235068-5235088 | 120 |
| CR001051 | HPFH | − | CCAGAACCUAUUUCAAUAAC | chr11: 5235071-5235091 | 121 |
| CR001052 | HPFH | + | UUCUGGAAACAUGAAUUUUA | chr11: 5235085-5235105 | 122 |
| CR001053 | HPFH | + | AUUUUGAAUGUUUAAAAUUA | chr11: 5235151-5235171 | 123 |
| CR001054 | HPFH | − | AAAUUUAAUCUGGCUGAAUA | chr11: 5235216-5235236 | 124 |
| CR001055 | HPFH | − | GAACUUCGUUAAAUUUAAUC | chr11: 5235226-5235246 | 125 |
| CR001056 | HPFH | + | AUUAAAUUUAACGAAGUUCC | chr11: 5235227-5235247 | 126 |
| CR001057 | HPFH | + | UUAAAUUUAACGAAGUUCCU | chr11: 5235228-5235248 | 127 |
| CR001058 | HPFH | − | UUCUGUACUAGCAUAUUCCC | chr11: 5235248-5235268 | 128 |
| CR001059 | HPFH | + | UGUGUUCUUAAAAAAAAAUG | Chr11: 5235275-5235297 | 129 |
| CR001060 | HPFH | + | AAAAAUGUGGAAUUAGACCC | chr11: 5235293-5235313 | 130 |
| CR001061 | HPFH | − | CUACUGGGAUCUUCAUUCCU | chr11: 5235313-5235333 | 131 |
| CR001062 | HPFH | − | ACUACUGGGAUCUUCAUUCC | chr11: 5235314-5235334 | 132 |
| CR001063 | HPFH | − | GAAAAGAGUGAAAAACUACU | chr11: 5235328-5235348 | 133 |
| CR001064 | HPFH | − | AGAAAAGAGUGAAAAACUAC | chr11: 5235329-5235349 | 134 |
| CR001065 | HPFH | + | GAAUUCAAAUAAUGCCACAA | chr11: 5235349-5235369 | 135 |
| CR001066 | HPFH | − | UGUGUAUUUGUCUGCCAUUG | chr11: 5235366-5235386 | 136 |
| CR001067 | HPFH | + | CACCCAUGAGCAUAUCCAAA | chr11: 5235384-5235404 | 137 |
| CR001068 | HPFH | − | UUCCUUUUGGAUAUGCUCAU | chr11: 5235389-5235409 | 138 |
| CR001069 | HPFH | − | CUUCCUUUUGGAUAUGCUCA | chr11: 5235390-5235410 | 139 |
| CR001070 | HPFH | + | CAUGAGCAUAUCCAAAAGGA | chr11: 5235388-5235408 | 140 |
| CR001071 | HPFH | + | UAUCCAAAAGGAAGGAUUGA | chr11: 5235396-5235416 | 141 |
| CR001072 | HPFH | − | UUUCCUUCAAUCCUUCCUUU | chr11: 5235402-5235422 | 142 |
| CR001073 | HPFH | + | AAGGAAGGAUUGAAGGAAAG | chr11: 5235403-5235423 | 143 |
| CR001074 | HPFH | + | GAAGGAUUGAAGGAAAGAGG | chr11: 5235406-5235426 | 144 |
| CR001075 | HPFH | + | GAGGAGGAAGAAAUGGAGAA | chr11: 5235422-5235442 | 145 |
| CR001076 | HPFH | + | AGGAAGAAAUGGAGAAAGGA | chr11: 5235426-5235446 | 146 |
| CR001077 | HPFH | + | GAAGGAAGAGGGGAAGAGAG | chr11: 5235448-5235468 | 147 |
| CR001078 | HPFH | + | GAAGAGGGGAAGAGAGAGGA | chr11: 5235452-5235472 | 148 |
| CR001079 | HPFH | + | AGGGGAAGAGAGAGGAUGGA | chr11: 5235456-5235476 | 149 |
| CR001080 | HPFH | + | GGGGAAGAGAGAGGAUGGAA | chr11: 5235457-5235477 | 150 |
| CR001081 | HPFH | + | AAGAGAGAGGAUGGAAGGGA | chr11: 5235461-5235481 | 151 |
| CR001082 | HPFH | + | AGAGAGGAUGGAAGGGAUGG | chr11: 5235464-5235484 | 152 |
| CR001083 | HPFH | + | GGAAGGGAUGGAGGAGAAGA | chr11: 5235473-5235493 | 153 |
| CR001084 | HPFH | + | GAAGAAGGAAAAAUAAAUAA | Chr11: 5235483-5235505 | 154 |
| CR001085 | HPFH | + | AGGAAAAAUAAAUAAUGGAG | Chr11: 5235488-5235510 | 155 |
| CR001086 | HPFH | + | AAAUAAAUAAUGGAGAGGAG | chr11: 5235498-5235518 | 156 |
| CR001087 | HPFH | + | UGGAGAGGAGAGGAGAAAAA | chr11: 5235508-5235528 | 157 |
| CR001088 | HPFH | + | AGAGGAGAGGAGAAAAAAGG | chr11: 5235511-5235531 | 158 |
| CR001089 | HPFH | + | GAGGAGAGGAGAAAAAAGGA | chr11: 5235512-5235532 | 159 |
| CR001090 | HPFH | + | AGGAGAGGAGAAAAAAGGAG | chr11: 5235513-5235533 | 160 |
| CR001091 | HPFH | + | AGGAGAAAAAAGGAGGGGAG | chr11: 5235518-5235538 | 161 |
| CR001092 | HPFH | + | GAGAGGAGAGGAGAAGGGAU | chr11: 5235535-5235555 | 162 |
| CR001093 | HPFH | + | AGAGGAGAGGAGAAGGGAUA | chr11: 5235536-5235556 | 163 |
| CR001094 | HPFH | + | GAAGAGAAAGAGAAAGGGAA | Chr11: 5235553-5235575 | 164 |
| CR001095 | HPFH | + | AAGAGAGGAAAGAAGAGAAG | chr11: 5235581-5235601 | 165 |
| CR001096 | HPFH | + | GAGAGAAAAGAAACGAAGAG | Chr11: 5235598-5235620 | 166 |
| CR001097 | HPFH | + | AGAGAAAAGAAACGAAGAGA | Chr11: 5235599-5235621 | 167 |
| CR001098 | HPFH | + | GAGAAAAGAAACGAAGAGAG | Chr11: 5235600-5235622 | 168 |
| CR001099 | HPFH | + | AAAGAAACGAAGAGAGGGGA | chr11: 5235609-5235629 | 169 |
| CR001100 | HPFH | + | AAGAAACGAAGAGAGGGGAA | chr11: 5235610-5235630 | 170 |
| CR001101 | HPFH | + | GGAAGGGAAGGAAAAAAAAG | chr11: 5235626-5235646 | 171 |
| CR001102 | HPFH | + | AAGACUGACAGUUCAAAUUU | chr11: 5235672-5235692 | 172 |
| CR001103 | HPFH | + | ACUGACAGUUCAAAUUUUGG | chr11: 5235675-5235695 | 173 |
| CR001104 | HPFH | + | UUCAAAUUUUGGUGGUGAUA | chr11: 5235683-5235703 | 174 |
| CR001105 | HPFH | + | AAUAGAAACUCAAACUCUGU | chr11: 5235709-5235729 | 175 |
| CR001106 | HPFH | + | GUACAAUAGUAUAACCCCUU | chr11: 5235739-5235759 | 176 |
| CR001107 | HPFH | − | CUAUUAAAGGUUUUCCAAAG | chr11: 5235756-5235776 | 177 |
| CR001108 | HPFH | − | ACUAUUAAAGGUUUUCCAAA | chr11: 5235757-5235777 | 178 |
| CR001109 | HPFH | − | UACUAUUAAAGGUUUUCCAA | chr11: 5235758-5235778 | 179 |
| CR001110 | HPFH | − | GCAUUUGUGGAUACUAUUAA | chr11: 5235769-5235789 | 180 |
| CR001111 | HPFH | + | UUAAUAGUAUCCACAAAUGC | chr11: 5235769-5235789 | 181 |
| CR001132 | HPFH | − | UAUCAAGCAUCCAGCAUUUG | chr11: 5235782-5235802 | 1500 |
| CR001133 | HPFH | − | UAUCUAAAAAUGUAAUUGCU | chr11: 5235814-5235834 | 1501 |
| CR001134 | HPFH | − | AGCAUUUCUAUACAUGUCUU | chr11: 5235862-5235882 | 1502 |
| CR001135 | HPFH | + | UAAUCAUAAAAACCUCAAAC | chr11: 5235893-5235913 | 1503 |
| CR001136 | HPFH | − | UUUAAGUGGCUACCGGUUUG | chr11: 5235908-5235928 | 1504 |
| CR001137 | HPFH | − | GUAAGCAUUUAAGUGGCUAC | chr11: 5235915-5235935 | 1505 |
| CR001138 | HPFH | − | ACUGUUGGUAAGCAUUUAAG | chr11: 5235922-5235942 | 1506 |
| CR001139 | HPFH | − | UAAUUUAUCAAUUCUACUGU | chr11: 5235937-5235957 | 1507 |
| CR001140 | HPFH | + | ACAGUAGAAUUGAUAAAUUA | chr11: 5235937-5235957 | 1508 |
| CR001141 | HPFH | + | CAAAUGCAUUUUACAGCAUU | chr11: 5236027-5236047 | 1509 |
| CR001142 | HPFH | + | GGUUGAUUAAAAGUAACCAG | chr11: 5236048-5236068 | 1510 |
| CR001143 | HPFH | − | AUAUAGUUUGAACUCACCUC | Chr11: 5236059-5236081 | 1511 |
| CR001144 | HPFH | + | UUUAUUUGUAUAUAGAAAGA | chr11: 5236090-5236110 | 1512 |
| CR001145 | HPFH | + | UGCCUGAGAUUCUGAUCACA | chr11: 5236119-5236139 | 1513 |
| CR001146 | HPFH | + | GCCUGAGAUUCUGAUCACAA | chr11: 5236120-5236140 | 1514 |
| CR001147 | HPFH | + | CCUGAGAUUCUGAUCACAAG | chr11: 5236121-5236141 | 1515 |
| CR001148 | HPFH | − | CCCCUUGUGAUCAGAAUCUC | chr11: 5236124-5236144 | 1516 |
| CR001149 | HPFH | + | AAGGGGAAAUGUUAUAAAAU | chr11: 5236138-5236158 | 1517 |
| CR001150 | HPFH | + | AGGGGAAAUGUUAUAAAAUA | chr11: 5236139-5236159 | 1518 |
| CR001151 | HPFH | + | UGUUAUAAAAUAGGGUAGAG | chr11: 5236147-5236167 | 1519 |
| CR001152 | HPFH | − | CAAAGUUUAAAGGUCAUUCA | chr11: 5236175-5236195 | 1520 |
| CR001153 | HPFH | − | UAACUUGUAACAAAGUUUAA | chr11: 5236185-5236205 | 1521 |
| CR001154 | HPFH | + | CAAGUUAUUUUUCUGUAACC | chr11: 5236198-5236218 | 1522 |
| CR001155 | HPFH | − | AAUAUCUUUCGUUGGCUUCC | chr11: 5236219-5236239 | 1523 |
| CR001156 | HPFH | − | AAUUAUUCAAUAUCUUUCGU | chr11: 5236227-5236247 | 1524 |
| CR001157 | HPFH | + | GAUAUUGAAUAAUUCAAGAA | chr11: 5236233-5236253 | 1525 |
| CR001158 | HPFH | + | AUUGAAUAAUUCAAGAAAGG | chr11: 5236236-5236256 | 1526 |
| CR001159 | HPFH | + | GAAUAAUUCAAGAAAGGUGG | chr11: 5236239-5236259 | 1527 |
| CR001160 | HPFH | + | AUUCAAGAAAGGUGGUGGCA | chr11: 5236244-5236264 | 1528 |
| CR001161 | HPFH | + | UAUUUUAGAAGUAGAGAAAA | chr11: 5236313-5236333 | 1529 |
| CR001162 | HPFH | + | AUUUUAGAAGUAGAGAAAAU | chr11: 5236314-5236334 | 1530 |
| CR001163 | HPFH | + | GAAAAUGGGAGACAAAUAGC | chr11: 5236328-5236348 | 1531 |
| CR001164 | HPFH | + | AAAAUGGGAGACAAAUAGCU | chr11: 5236329-5236349 | 1532 |
| CR001165 | HPFH | + | AGCUGGGCUUCUGUUGCAGU | chr11: 5236345-5236365 | 1533 |
| CR001166 | HPFH | + | GCUGGGCUUCUGUUGCAGUA | chr11: 5236346-5236366 | 1534 |
| CR001167 | HPFH | + | GCCAUUUCUAUUAUCAGACU | chr11: 5236383-5236403 | 1535 |
| CR001168 | HPFH | − | UCCAAGUCUGAUAAUAGAAA | chr11: 5236387-5236407 | 1536 |
| CR001169 | HPFH | + | UUAUCAGACUUGGACCAUGA | chr11: 5236393-5236413 | 1537 |
| CR001170 | HPFH | − | CACGACUGACAUCACCGUCA | chr11: 5236410-5236430 | 1538 |
| CR001171 | HPFH | + | UCAGUCGUGAACACAAGAAU | chr11: 5236421-5236441 | 1539 |
| CR001172 | HPFH | + | CAGUCGUGAACACAAGAAUA | chr11: 5236422-5236442 | 1540 |
| CR001173 | HPFH | + | GGCCACAUUUGUGAGUUUAG | chr11: 5236443-5236463 | 1541 |
| CR001174 | HPFH | − | UACCACUAAACUCACAAAUG | chr11: 5236448-5236468 | 1542 |
| CR001175 | HPFH | + | UAAAAUCAGAAAUACAGUCU | chr11: 5236471-5236491 | 1543 |
| CR001176 | HPFH | + | AAAAGAUGUACUUAGAUAUG | chr11: 5236528-5236548 | 1544 |
| CR001177 | HPFH | + | UGUACUUAGAUAUGUGGAUC | chr11: 5236534-5236554 | 1545 |
| CR001178 | HPFH | + | AGCUCAGAAAGAAUACAACC | chr11: 5236557-5236577 | 1546 |
| CR001179 | HPFH | + | ACCAGGUCAAGAAUACAGAA | chr11: 5236574-5236594 | 1547 |
| CR001180 | HPFH | − | UCCAUUCUGUAUUCUUGACC | chr11: 5236578-5236598 | 1548 |
| CR001181 | HPFH | − | CUGUCAUUUUUAACAGGUAG | chr11: 5236646-5236666 | 1549 |
| CR001182 | HPFH | − | CAUCAUCUGUCAUUUUUAAC | chr11: 5236652-5236672 | 1550 |
| CR001183 | HPFH | − | AAACACAUUCUAAGAUUUUA | chr11: 5236691-5236711 | 1551 |
| CR001184 | HPFH | + | AAUCUUAGAAUGUGUUUGUG | chr11: 5236694-5236714 | 1552 |
| CR001185 | HPFH | + | AUCUUAGAAUGUGUUUGUGA | chr11: 5236695-5236715 | 1553 |
| CR001186 | HPFH | + | UUAGAAUGUGUUUGUGAGGG | chr11: 5236698-5236718 | 1554 |
| CR001187 | HPFH | − | CAAUUUUCUUAUAUAUGAAU | chr11: 5236734-5236754 | 1555 |
| CR001188 | HPFH | + | UUGAUUCUAAAAAAAAUGUU | Chr11: 5236746-5236768 | 1556 |
| CR001189 | HPFH | + | AAAUGUUAGGUAAAUUCUUA | chr11: 5236764-5236784 | 1557 |
| CR001190 | HPFH | + | GGUAAAUUCUUAAGGCCAUG | chr11: 5236772-5236792 | 1558 |
| CR001191 | HPFH | − | AGAUCAAAUAACAGUCCUCA | chr11: 5236790-5236810 | 1559 |
| CR001192 | HPFH | + | GUCUGUUAAUUCCAAAGACU | chr11: 5236812-5236832 | 1560 |
| CR001193 | HPFH | − | AAAGUGAAAAGCCAAGUCUU | chr11: 5236826-5236846 | 1561 |
| CR001194 | HPFH | + | CCUGAAAUGAUUUUACACAU | chr11: 5236858-5236878 | 1562 |
| CR001195 | HPFH | − | CCAAUGUGUAAAAUCAUUUC | chr11: 5236861-5236881 | 1563 |
| CR001196 | HPFH | + | CUGAAAUGAUUUUACACAUU | chr11: 5236859-5236879 | 1564 |
| CR001197 | HPFH | + | AUUUUACACAUUGGGAGAUC | chr11: 5236867-5236887 | 1565 |
| CR001198 | HPFH | + | GGUUACAUGUUUAUUCUAUA | chr11: 5236888-5236908 | 1566 |
| CR001199 | HPFH | + | UCUAUAUGGAUUGCAUUGAG | chr11: 5236902-5236922 | 1567 |
| CR001200 | HPFH | + | AGGAUUUGUAUAACAGAAUA | chr11: 5236922-5236942 | 1568 |
| CR001201 | HPFH | + | UUUUCUUUUCUCUUCUGAGA | Chr11: 5236945-5236967 | 1569 |
| CR001202 | HPFH | − | GCACUCUAGCUUGGGCAAUA | chr11: 5236984-5237004 | 1570 |
| CR001203 | HPFH | − | UGCACUCUAGCUUGGGCAAU | chr11: 5236985-5237005 | 1571 |
| CR001204 | HPFH | − | UGCACCAUUGCACUCUAGCU | Chr11: 5236985-5237007 | 1572 |
| CR001205 | HPFH | − | GCUAUUCAGGUGGCUGAGGC | chr11: 5237061-5237081 | 1573 |
| CR001206 | HPFH | + | ACCUGAAUAGCUGGGACUGC | Chr11: 5237065-5237087 | 1574 |
| CR001207 | HPFH | + | GCAGGCAUGCACCACACGCC | Chr11: 5237083-5237105 | 1575 |
| CR001208 | HPFH | − | UACAAAAUCAGCCGGGCGUG | chr11: 5237102-5237122 | 1576 |
| CR001209 | HPFH | − | GGCUUGUAAACCCAGCACUU | chr11: 5237208-5237228 | 1577 |
| CR001210 | HPFH | − | CUGGCUGGAUGCGGUGGCUC | chr11: 5237229-5237249 | 1578 |
| CR001211 | HPFH | + | CUGAGCCACCGCAUCCAGCC | chr11: 5237227-5237247 | 1579 |
| CR001212 | HPFH | − | CUUAUCCUGGCUGGAUGCGG | chr11: 5237235-5237255 | 1580 |
| CR001213 | HPFH | + | CACCGCAUCCAGCCAGGAUA | chr11: 5237233-5237253 | 1581 |
| CR001214 | HPFH | − | GACCUUAUCCUGGCUGGAUG | chr11: 5237238-5237258 | 1582 |
| CR001215 | HPFH | − | CUUUUAGACCUUAUCCUGGC | chr11: 5237244-5237264 | 1583 |
| CR001216 | HPFH | + | GCCAGGAUAAGGUCUAAAAG | chr11: 5237244-5237264 | 1584 |
| CR001217 | HPFH | − | UCCACUUUUAGACCUUAUCC | chr11: 5237248-5237268 | 1585 |
| CR001218 | HPFH | + | AAUAGCAUCUACUCUUGUUC | chr11: 5237271-5237291 | 1586 |
| CR001219 | HPFH | + | CUCUUGUUCAGGAAACAAUG | chr11: 5237282-5237302 | 1587 |
| CR001220 | HPFH | + | GGAAACAAUGAGGACCUGAC | chr11: 5237292-5237312 | 1588 |
| CR001221 | HPFH | + | GAAACAAUGAGGACCUGACU | chr11: 5237293-5237313 | 1589 |
| CR001222 | HPFH | + | ACCUGACUGGGCAGUAAGAG | chr11: 5237305-5237325 | 1590 |
| CR001223 | HPFH | − | ACCACUCUUACUGCCCAGUC | chr11: 5237309-5237329 | 1591 |
| CR001224 | HPFH | + | AAGAGUGGUGAUUAAUAGAU | chr11: 5237320-5237340 | 1592 |
| CR001225 | HPFH | + | AGAGUGGUGAUUAAUAGAUA | chr11: 5237321-5237341 | 1593 |
| CR001226 | HPFH | + | AGAAUCGAACUGUUGAUUAG | chr11: 5237356-5237376 | 1594 |
| CR001227 | HPFH | + | UCGAACUGUUGAUUAGAGGU | chr11: 5237360-5237380 | 1595 |
| CR003027 | HPFH | + | CGAACUGUUGAUUAGAGGUA | chr11: 5237361-5237381 | 1692 |
| CR003028 | HPFH | + | AUGAUUUUAAUCUGUGACCU | chr11: 5237386-5237406 | 1693 |
| CR003029 | HPFH | + | UAAUCUGUGACCUUGGUGAA | chr11: 5237393-5237413 | 1694 |
| CR003030 | HPFH | + | AAUCUGUGACCUUGGUGAAU | chr11: 5237394-5237414 | 1695 |
| CR003031 | HPFH | − | AGCUACUUGCCCAUUCACCA | chr11: 5237406-5237426 | 1696 |
| CR003032 | HPFH | + | UAGCUAUCUAAUGACUAAAA | chr11: 5237421-5237441 | 1697 |
| CR003033 | HPFH | + | AUGACUAAAAUGGAAAACAC | chr11: 5237431-5237451 | 1698 |
| CR003034 | HPFH | + | AAAUACCCAUGCUGAGUCUG | chr11: 5237482-5237502 | 1699 |
| CR003035 | HPFH | − | AGGCACCUCAGACUCAGCAU | chr11: 5237490-5237510 | 1700 |
| CR003036 | HPFH | − | UAGGCACCUCAGACUCAGCA | chr11: 5237491-5237511 | 1701 |
| CR003037 | HPFH | + | GCUGAGUCUGAGGUGCCUAU | chr11: 5237492-5237512 | 1702 |
| CR003038 | HPFH | − | UAUUUAUAUAGAUGUCCUAU | chr11: 5237510-5237530 | 1703 |
| CR003039 | HPFH | − | CAUAUAUCAAACAAUGUACU | chr11: 5237535-5237555 | 1704 |
| CR003040 | HPFH | + | CCAGUACAUUGUUUGAUAUA | chr11: 5237533-5237553 | 1705 |
| CR003041 | HPFH | − | CCAUAUAUCAAACAAUGUAC | chr11: 5237536-5237556 | 1706 |
| CR003042 | HPFH | + | CAGUACAUUGUUUGAUAUAU | chr11: 5237534-5237554 | 1707 |
| CR003043 | HPFH | + | CAUUGUUUGAUAUAUGGGUU | chr11: 5237539-5237559 | 1708 |
| CR003044 | HPFH | + | GAUAUAUGGGUUUGGCACUG | chr11: 5237547-5237567 | 1709 |
| CR003045 | HPFH | + | UAUGGGUUUGGCACUGAGGU | chr11: 5237551-5237571 | 1710 |
| CR003046 | HPFH | + | GGGUUUGGCACUGAGGUUGG | chr11: 5237554-5237574 | 1711 |
| CR003047 | HPFH | + | GCACUGAGGUUGGAGGUCAG | chr11: 5237561-5237581 | 1712 |
| CR003048 | HPFH | + | CAGAGGUUAGAAAUCAGAGU | chr11: 5237578-5237598 | 1713 |
| CR003049 | HPFH | + | AGAGGUUAGAAAUCAGAGUU | chr11: 5237579-5237599 | 1714 |
| CR003050 | HPFH | + | UAGAAAUCAGAGUUGGGAAU | chr11: 5237585-5237605 | 1715 |
| CR003051 | HPFH | + | AGAAAUCAGAGUUGGGAAUU | chr11: 5237586-5237606 | 1716 |
| CR003052 | HPFH | + | GUUGGGAAUUGGGAUUAUAC | chr11: 5237596-5237616 | 1717 |
| CR003053 | HPFH | − | CUUUGUAUUCAUCACACUCU | chr11: 5237654-5237674 | 1718 |
| CR003054 | HPFH | + | AUGAAUACAAAGUUAAAUGA | chr11: 5237662-5237682 | 1719 |
| CR003055 | HPFH | − | UAAAUGUUGGUGUUCAUUAA | chr11: 5237689-5237709 | 1720 |
| CR003056 | HPFH | − | UGAGAUUUCACAUUAAAUGU | chr11: 5237702-5237722 | 1721 |
| CR003057 | HPFH | + | ACAUUUAAUGUGAAAUCUCA | chr11: 5237702-5237722 | 1722 |
| CR003058 | HPFH | − | UAAAAUCAUCGGGGAUUUUG | chr11: 5237749-5237769 | 1723 |
| CR003059 | HPFH | − | CUAAAAUCAUCGGGGAUUUU | chr11: 5237750-5237770 | 1724 |
| CR003060 | HPFH | − | UCUAAAAUCAUCGGGGAUUU | chr11: 5237751-5237771 | 1725 |
| CR003061 | HPFH | − | ACUGAGUUCUAAAAUCAUCG | chr11: 5237758-5237778 | 1726 |
| CR003062 | HPFH | − | UACUGAGUUCUAAAAUCAUC | chr11: 5237759-5237779 | 1727 |
| CR003063 | HPFH | − | AUACUGAGUUCUAAAAUCAU | chr11: 5237760-5237780 | 1728 |
| CR003064 | HPFH | + | UAAUUAGUGUAAUGCCAAUG | chr11: 5237786-5237806 | 1729 |
| CR003065 | HPFH | + | AAUUAGUGUAAUGCCAAUGU | chr11: 5237787-5237807 | 1730 |
| CR003066 | HPFH | + | AAUGCCAAUGUGGGUUAGAA | chr11: 5237796-5237816 | 1731 |
| CR003067 | HPFH | − | ACUUCCAUUCUAACCCACAU | chr11: 5237803-5237823 | 1732 |
| CR003068 | HPFH | + | AAUGGAAGUCAACUUGCUGU | chr11: 5237814-5237834 | 1733 |
| CR003069 | HPFH | + | CUUGCUGUUGGUUUCAGAGC | chr11: 5237826-5237846 | 1734 |
| CR003070 | HPFH | + | CUGUUGGUUUCAGAGCAGGU | chr11: 5237830-5237850 | 1735 |
| CR003071 | HPFH | + | UUCAGAGCAGGUAGGAGAUA | chr11: 5237838-5237858 | 1736 |
| CR003072 | HPFH | + | AGUGAAAAGCUGAAACAAAA | chr11: 5237877-5237897 | 1737 |
| CR003073 | HPFH | + | AAGCUGAAACAAAAAGGAAA | chr11: 5237883-5237903 | 1738 |
| CR003074 | HPFH | + | UGAAACAAAAAGGAAAAGGU | chr11: 5237887-5237907 | 1739 |
| CR003075 | HPFH | + | GAAACAAAAAGGAAAAGGUA | chr11: 5237888-5237908 | 1740 |
| CR003076 | HPFH | + | GGAAAAGGUAGGGUGAAAGA | chr11: 5237898-5237918 | 1741 |
| CR003077 | HPFH | + | GAAAAGGUAGGGUGAAAGAU | chr11: 5237899-5237919 | 1742 |
| CR003078 | HPFH | + | AAAGAUGGGAAAUGUAUGUA | chr11: 5237913-5237933 | 1743 |
| CR003079 | HPFH | + | GAUGGGAAAUGUAUGUAAGG | chr11: 5237916-5237936 | 1744 |
| CR003080 | HPFH | + | UGUAAGGAGGAUGAGCCACA | chr11: 5237929-5237949 | 1745 |
| CR003081 | HPFH | + | GGAGGAUGAGCCACAUGGUA | chr11: 5237934-5237954 | 1746 |
| CR003082 | HPFH | + | GAGGAUGAGCCACAUGGUAU | chr11: 5237935-5237955 | 1747 |
| CR003083 | HPFH | + | GAUGAGCCACAUGGUAUGGG | chr11: 5237938-5237958 | 1748 |
| CR003084 | HPFH | − | AGUAUACCUCCCAUACCAUG | chr11: 5237947-5237967 | 1749 |
| CR003085 | HPFH | + | AUGGUAUGGGAGGUAUACUA | chr11: 5237948-5237968 | 1750 |
| CR003086 | HPFH | + | GGAGGUAUACUAAGGACUCU | chr11: 5237956-5237976 | 1751 |
| CR003087 | HPFH | + | GAGGUAUACUAAGGACUCUA | chr11: 5237957-5237977 | 1752 |
| CR003088 | HPFH | + | ACUCUAGGGUCAGAGAAAUA | chr11: 5237971-5237991 | 1753 |
| CR003089 | HPFH | + | CUCUAGGGUCAGAGAAAUAU | chr11: 5237972-5237992 | 1754 |
| CR003090 | HPFH | − | AAGAAUGUGAAUUUUGUAGA | chr11: 5238004-5238024 | 1755 |
| CR003091 | HPFH | + | UUCUACAAAAUUCACAUUCU | chr11: 5238003-5238023 | 1756 |
| CR003092 | HPFH | + | ACAAAAUUCACAUUCUUGGC | chr11: 5238007-5238027 | 1757 |
| CR003093 | HPFH | + | CAAAAUUCACAUUCUUGGCU | chr11: 5238008-5238028 | 1758 |
| CR003094 | HPFH | + | UUCACAUUCUUGGCUGGGUG | chr11: 5238013-5238033 | 1759 |
| CR003095 | HPFH | + | AGGGUGGAUCACCUGAUGUU | chr11: 5238071-5238093 | 1760 |
| CR003096 | HPFH | − | GAUCUCGAACUCCUAACAUC | chr11: 5238090-5238110 | 1761 |

[0461] In some aspects of the invention, it is preferred that the gRNA molecule to an HPFH region comprise, e.g., consist of, a targeting domain of a gRNA capable of producing at least about a 20% increase in F cells relative to control, e.g., in an assay described in Example 4. In an aspect, the gRNA molecule includes a targeting domain comprising, e.g., consisting of, SEQ ID NO: 113. In an aspect, the gRNA molecule includes a targeting domain comprising, e.g., consisting of, SEQ ID NO: 99. In an aspect, the gRNA molecule includes a targeting domain comprising, e.g., consisting of, SEQ ID NO: 112. In an aspect, the gRNA molecule includes a targeting domain comprising, e.g., consisting of, SEQ ID NO: 98. In an aspect, the gRNA molecule includes a targeting domain comprising, e.g., consisting of, SEQ ID NO: 1580. In an aspect, the gRNA molecule includes a targeting domain comprising, e.g., consisting of, SEQ ID NO: 106. In an aspect, the gRNA molecule includes a targeting domain comprising, e.g., consisting of, SEQ ID NO: 1589. In an aspect, the gRNA molecule includes a targeting domain comprising, e.g., consisting of, SEQ ID NO: 1503. In an aspect, the gRNA molecule includes a targeting domain comprising, e.g., consisting of, SEQ ID NO: 160. In an aspect, the gRNA molecule includes a targeting domain comprising, e.g., consisting of, SEQ ID NO: 1537. In an aspect, the gRNA molecule includes a targeting domain comprising, e.g., consisting of, SEQ ID NO: 159. In an aspect, the gRNA molecule includes a targeting domain comprising, e.g., consisting of, SEQ ID NO: 101. In an aspect, the gRNA molecule includes a targeting domain comprising, e.g., consisting of, SEQ ID NO: 162. In an aspect, the gRNA molecule includes a targeting domain comprising, e.g., consisting of, SEQ ID NO: 104. In an aspect, the gRNA molecule includes a targeting domain comprising, e.g., consisting of, SEQ ID NO: 138. In an aspect, the gRNA molecule includes a targeting domain comprising, e.g., consisting of, SEQ ID NO: 1536. In an aspect, the gRNA molecule includes a targeting domain comprising, e.g., consisting of, SEQ ID NO: 1539. In an aspect, the gRNA molecule includes a targeting domain comprising, e.g., consisting of, SEQ ID NO: 1585.

[0462] In some aspects of the invention, e.g., as indicated herein, it may be beneficial to include gRNA molecules targeting more than one, e.g., two, target sites (e.g., a first gRNA molecule and a second gRNA molecule). In some embodiments, the two target sites are both located in an HPFH region. In such aspects, any combination of more than one, e.g., two, gRNA molecules (e.g., a first gRNA molecule and a second gRNA molecule) comprising targeting domains listed in Table 6 may be used. In an aspect, the first gRNA molecule and the second gRNA molecule include targeting domains comprising, e.g., consisting of, SEQ ID NO: 100 and SEQ ID NO: 165, respectively. In an aspect, the first gRNA molecule and the second gRNA molecule include targeting domains comprising, e.g., consisting of, SEQ ID NO: 100 and SEQ ID NO: 113, respectively. In an aspect, the first gRNA molecule and the second gRNA molecule include targeting domains comprising, e.g., consisting of, SEQ ID NO: 100 and SEQ ID NO: 99, respectively. In an aspect, the first gRNA molecule and the second gRNA molecule include targeting domains comprising, e.g., consisting of, SEQ ID NO: 100 and SEQ ID NO: 112, respectively. In an aspect, the first gRNA molecule and the second gRNA molecule include targeting domains comprising, e.g., consisting of, SEQ ID NO: 100 and SEQ ID NO: 98, respectively. In an aspect, the first gRNA molecule and the second gRNA molecule include targeting domains comprising, e.g., consisting of, SEQ ID NO: 100 and SEQ ID NO: 1580, respectively. In an aspect, the first gRNA molecule and the second gRNA molecule include targeting domains comprising, e.g., consisting of, SEQ ID NO: 100 and SEQ ID NO: 106, respectively. In an aspect, the first gRNA molecule and the second gRNA molecule include targeting domains comprising, e.g., consisting of, SEQ ID NO: 100 and SEQ ID NO: 1503, respectively. In an aspect, the first gRNA molecule and the second gRNA molecule include targeting domains comprising, e.g., consisting of, SEQ ID NO: 100 and SEQ ID NO: 1589, respectively. In an aspect, the first gRNA molecule and the second gRNA molecule include targeting domains comprising, e.g., consisting of, SEQ ID NO: 100 and SEQ ID NO: 160, respectively. In an aspect, the first gRNA molecule and the second gRNA molecule include targeting domains comprising, e.g., consisting of, SEQ ID NO: 100 and SEQ ID NO: 1537, respectively. In an aspect, the first gRNA molecule and the second gRNA molecule include targeting domains comprising, e.g., consisting of, SEQ ID NO: 100 and SEQ ID NO: 159, respectively. In an aspect, the first gRNA molecule and the second gRNA molecule include targeting domains comprising, e.g., consisting of, SEQ ID NO: 100 and SEQ ID NO: 101, respectively. In an aspect, the first gRNA molecule and the second gRNA molecule include targeting domains comprising, e.g., consisting of, SEQ ID NO: 100 and SEQ ID NO: 162, respectively. In an aspect, the first gRNA molecule and the second gRNA molecule include targeting domains comprising, e.g., consisting of, SEQ ID NO: 100 and SEQ ID NO: 104, respectively. In an aspect, the first gRNA molecule and the second gRNA molecule include targeting domains comprising, e.g., consisting of, SEQ ID NO: 100 and SEQ ID NO: 138, respectively. In an aspect, the first gRNA molecule and the second gRNA molecule include targeting domains comprising, e.g., consisting of, SEQ ID NO: 100 and SEQ ID NO: 1536, respectively. In an aspect, the first gRNA molecule and the second gRNA molecule include targeting domains comprising, e.g., consisting of, SEQ ID NO: 100 and SEQ ID NO: 1539, respectively. In an aspect, the first gRNA molecule and the second gRNA molecule include targeting domains comprising, e.g., consisting of, SEQ ID NO: 100 and SEQ ID NO: 1585, respectively. In an aspect, the first gRNA molecule and the second gRNA molecule include targeting domains comprising, e.g., consisting of, SEQ ID NO: 165 and SEQ ID NO: 113, respectively. In an aspect, the first gRNA molecule and the second gRNA molecule include targeting domains comprising, e.g., consisting of, SEQ ID NO: 165 and SEQ ID NO: 99, respectively. In an aspect, the first gRNA molecule and the second gRNA molecule include targeting domains comprising, e.g., consisting of, SEQ ID NO: 165 and SEQ ID NO: 112, respectively. In an aspect, the first gRNA molecule and the second gRNA molecule include targeting domains comprising, e.g., consisting of, SEQ ID NO: 165 and SEQ ID NO: 98, respectively. In an aspect, the first gRNA molecule and the second gRNA molecule include targeting domains comprising, e.g., consisting of, SEQ ID NO: 165 and SEQ ID NO: 1580, respectively. In an aspect, the first gRNA molecule and the second gRNA molecule include targeting domains comprising, e.g., consisting of, SEQ ID NO: 165 and SEQ ID NO: 106, respectively. In an aspect, the first gRNA molecule and the second gRNA molecule include targeting domains comprising, e.g., consisting of, SEQ ID NO: 165 and SEQ ID NO: 1503, respectively. In an aspect, the first gRNA molecule and the second gRNA molecule include targeting domains comprising, e.g., consisting of, SEQ ID NO: 165 and SEQ ID NO: 1589, respectively. In an aspect, the first gRNA molecule and the second gRNA molecule include targeting domains comprising, e.g., consisting of, SEQ ID NO: 165 and SEQ ID NO: 160, respectively. In an aspect, the first gRNA molecule and the second gRNA molecule include targeting domains comprising, e.g., consisting of, SEQ ID NO: 165 and SEQ ID NO: 1537, respectively. In an aspect, the first gRNA molecule and the second gRNA molecule include targeting domains comprising, e.g., consisting of, SEQ ID NO: 165 and SEQ ID NO: 159, respectively. In an aspect, the first gRNA molecule and the second gRNA molecule include targeting domains comprising, e.g., consisting of, SEQ ID NO: 165 and SEQ ID NO: 101, respectively. In an aspect, the first gRNA molecule and the second gRNA molecule include targeting domains comprising, e.g., consisting of, SEQ ID NO: 165 and SEQ ID NO: 162, respectively. In an aspect, the first gRNA molecule and the second gRNA molecule include targeting domains comprising, e.g., consisting of, SEQ ID NO: 165 and SEQ ID NO: 104, respectively. In an aspect, the first gRNA molecule and the second gRNA molecule include targeting domains comprising, e.g., consisting of, SEQ ID NO: 165 and SEQ ID NO: 138, respectively. In an aspect, the first gRNA molecule and the second gRNA molecule include targeting domains comprising, e.g., consisting of, SEQ ID NO: 165 and SEQ ID NO: 1536, respectively. In an aspect, the first gRNA molecule and the second gRNA molecule include targeting domains comprising, e.g., consisting of, SEQ ID NO: 165 and SEQ ID NO: 1539, respectively. In an aspect, the first gRNA molecule and the second gRNA molecule include targeting domains comprising, e.g., consisting of, SEQ ID NO: 165 and SEQ ID NO: 1585, respectively. In an aspect, the first gRNA molecule and the second gRNA molecule include targeting domains comprising, e.g., consisting of, SEQ ID NO: 113 and SEQ ID NO: 165, respectively. In an aspect, the first gRNA molecule and the second gRNA molecule include targeting domains comprising, e.g., consisting of, SEQ ID NO: 113 and SEQ ID NO: 99, respectively. In an aspect, the first gRNA molecule and the second gRNA molecule include targeting domains comprising, e.g., consisting of, SEQ ID NO: 113 and SEQ ID NO: 112, respectively. In an aspect, the first gRNA molecule and the second gRNA molecule include targeting domains comprising, e.g., consisting of, SEQ ID NO: 113 and SEQ ID NO: 98, respectively. In an aspect, the first gRNA molecule and the second gRNA molecule include targeting domains comprising, e.g., consisting of, SEQ ID NO: 113 and SEQ ID NO: 1580, respectively. In an aspect, the first gRNA molecule and the second gRNA molecule include targeting domains comprising, e.g., consisting of, SEQ ID NO: 113 and SEQ ID NO: 106, respectively. In an aspect, the first gRNA molecule and the second gRNA molecule include targeting domains comprising, e.g., consisting of, SEQ ID NO: 113 and SEQ ID NO: 1503, respectively. In an aspect, the first gRNA molecule and the second gRNA molecule include targeting domains comprising, e.g., consisting of, SEQ ID NO: 113 and SEQ ID NO: 1589, respectively. In an aspect, the first gRNA molecule and the second gRNA molecule include targeting domains comprising, e.g., consisting of, SEQ ID NO: 113 and SEQ ID NO: 160, respectively. In an aspect, the first gRNA molecule and the second gRNA molecule include targeting domains comprising, e.g., consisting of, SEQ ID NO: 113 and SEQ ID NO: 1537, respectively. In an aspect, the first gRNA molecule and the second gRNA molecule include targeting domains comprising, e.g., consisting of, SEQ ID NO: 113 and SEQ ID NO: 159, respectively. In an aspect, the first gRNA molecule and the second gRNA molecule include targeting domains comprising, e.g., consisting of, SEQ ID NO: 113 and SEQ ID NO: 101, respectively. In an aspect, the first gRNA molecule and the second gRNA molecule include targeting domains comprising, e.g., consisting of, SEQ ID NO: 113 and SEQ ID NO: 162, respectively. In an aspect, the first gRNA molecule and the second gRNA molecule include targeting domains comprising, e.g., consisting of, SEQ ID NO: 113 and SEQ ID NO: 104, respectively. In an aspect, the first gRNA molecule and the second gRNA molecule include targeting domains comprising, e.g., consisting of, SEQ ID NO: 113 and SEQ ID NO: 138, respectively. In an aspect, the first gRNA molecule and the second gRNA molecule include targeting domains comprising, e.g., consisting of, SEQ ID NO: 113 and SEQ ID NO: 1536, respectively. In an aspect, the first gRNA molecule and the second gRNA molecule include targeting domains comprising, e.g., consisting of, SEQ ID NO: 113 and SEQ ID NO: 1539, respectively. In an aspect, the first gRNA molecule and the second gRNA molecule include targeting domains comprising, e.g., consisting of, SEQ ID NO: 113 and SEQ ID NO: 1585, respectively. In an aspect, the first gRNA molecule and the second gRNA molecule include targeting domains comprising, e.g., consisting of, SEQ ID NO: 99 and SEQ ID NO: 165, respectively. In an aspect, the first gRNA molecule and the second gRNA molecule include targeting domains comprising, e.g., consisting of, SEQ ID NO: 99 and SEQ ID NO: 113, respectively. In an aspect, the first gRNA molecule and the second gRNA molecule include targeting domains comprising, e.g., consisting of, SEQ ID NO: 99 and SEQ ID NO: 112, respectively. In an aspect, the first gRNA molecule and the second gRNA molecule include targeting domains comprising, e.g., consisting of, SEQ ID NO: 99 and SEQ ID NO: 98, respectively. In an aspect, the first gRNA molecule and the second gRNA molecule include targeting domains comprising, e.g., consisting of, SEQ ID NO: 99 and SEQ ID NO: 1580, respectively. In an aspect, the first gRNA molecule and the second gRNA molecule include targeting domains comprising, e.g., consisting of, SEQ ID NO: 99 and SEQ ID NO: 106, respectively. In an aspect, the first gRNA molecule and the second gRNA molecule include targeting domains comprising, e.g., consisting of, SEQ ID NO: 99 and SEQ ID NO: 1503, respectively. In an aspect, the first gRNA molecule and the second gRNA molecule include targeting domains comprising, e.g., consisting of, SEQ ID NO: 99 and SEQ ID NO: 1589, respectively. In an aspect, the first gRNA molecule and the second gRNA molecule include targeting domains comprising, e.g., consisting of, SEQ ID NO: 99 and SEQ ID NO: 160, respectively. In an aspect, the first gRNA molecule and the second gRNA molecule include targeting domains comprising, e.g., consisting of, SEQ ID NO: 99 and SEQ ID NO: 1537, respectively. In an aspect, the first gRNA molecule and the second gRNA molecule include targeting domains comprising, e.g., consisting of, SEQ ID NO: 99 and SEQ ID NO: 159, respectively. In an aspect, the first gRNA molecule and the second gRNA molecule include targeting domains comprising, e.g., consisting of, SEQ ID NO: 99 and SEQ ID NO: 101, respectively. In an aspect, the first gRNA molecule and the second gRNA molecule include targeting domains comprising, e.g., consisting of, SEQ ID NO: 99 and SEQ ID NO: 162, respectively. In an aspect, the first gRNA molecule and the second gRNA molecule include targeting domains comprising, e.g., consisting of, SEQ ID NO: 99 and SEQ ID NO: 104, respectively. In an aspect, the first gRNA molecule and the second gRNA molecule include targeting domains comprising, e.g., consisting of, SEQ ID NO: 99 and SEQ ID NO: 138, respectively. In an aspect, the first gRNA molecule and the second gRNA molecule include targeting domains comprising, e.g., consisting of, SEQ ID NO: 99 and SEQ ID NO: 1536, respectively. In an aspect, the first gRNA molecule and the second gRNA molecule include targeting domains comprising, e.g., consisting of, SEQ ID NO: 99 and SEQ ID NO: 1539, respectively. In an aspect, the first gRNA molecule and the second gRNA molecule include targeting domains comprising, e.g., consisting of, SEQ ID NO: 99 and SEQ ID NO: 1585, respectively. In an aspect, the first gRNA molecule and the second gRNA molecule include targeting domains comprising, e.g., consisting of, SEQ ID NO: 112 and SEQ ID NO: 165, respectively. In an aspect, the first gRNA molecule and the second gRNA molecule include targeting domains comprising, e.g., consisting of, SEQ ID NO: 112 and SEQ ID NO: 113, respectively. In an aspect, the first gRNA molecule and the second gRNA molecule include targeting domains comprising, e.g., consisting of, SEQ ID NO: 112 and SEQ ID NO: 99, respectively. In an aspect, the first gRNA molecule and the second gRNA molecule include targeting domains comprising, e.g., consisting of, SEQ ID NO: 112 and SEQ ID NO: 98, respectively. In an aspect, the first gRNA molecule and the second gRNA molecule include targeting domains comprising, e.g., consisting of, SEQ ID NO: 112 and SEQ ID NO: 1580, respectively. In an aspect, the first gRNA molecule and the second gRNA molecule include targeting domains comprising, e.g., consisting of, SEQ ID NO: 112 and SEQ ID NO: 106, respectively. In an aspect, the first gRNA molecule and the second gRNA molecule include targeting domains comprising, e.g., consisting of, SEQ ID NO: 112 and SEQ ID NO: 1503, respectively. In an aspect, the first gRNA molecule and the second gRNA molecule include targeting domains comprising, e.g., consisting of, SEQ ID NO: 112 and SEQ ID NO: 1589, respectively. In an aspect, the first gRNA molecule and the second gRNA molecule include targeting domains comprising, e.g., consisting of, SEQ ID NO: 112 and SEQ ID NO: 160, respectively. In an aspect, the first gRNA molecule and the second gRNA molecule include targeting domains comprising, e.g., consisting of, SEQ ID NO: 112 and SEQ ID NO: 1537, respectively. In an aspect, the first gRNA molecule and the second gRNA molecule include targeting domains comprising, e.g., consisting of, SEQ ID NO: 112 and SEQ ID NO: 159, respectively. In an aspect, the first gRNA molecule and the second gRNA molecule include targeting domains comprising, e.g., consisting of, SEQ ID NO: 112 and SEQ ID NO: 101, respectively. In an aspect, the first gRNA molecule and the second gRNA molecule include targeting domains comprising, e.g., consisting of, SEQ ID NO: 112 and SEQ ID NO: 162, respectively. In an aspect, the first gRNA molecule and the second gRNA molecule include targeting domains comprising, e.g., consisting of, SEQ ID NO: 112 and SEQ ID NO: 104, respectively. In an aspect, the first gRNA molecule and the second gRNA molecule include targeting domains comprising, e.g., consisting of, SEQ ID NO: 112 and SEQ ID NO: 138, respectively. In an aspect, the first gRNA molecule and the second gRNA molecule include targeting domains comprising, e.g., consisting of, SEQ ID NO: 112 and SEQ ID NO: 1536, respectively. In an aspect, the first gRNA molecule and the second gRNA molecule include targeting domains comprising, e.g., consisting of, SEQ ID NO: 112 and SEQ ID NO: 1539, respectively. In an aspect, the first gRNA molecule and the second gRNA molecule include targeting domains comprising, e.g., consisting of, SEQ ID NO: 112 and SEQ ID NO: 1585, respectively. In an aspect, the first gRNA molecule and the second gRNA molecule include targeting domains comprising, e.g., consisting of, SEQ ID NO: 98 and SEQ ID NO: 165, respectively. In an aspect, the first gRNA molecule and the second gRNA molecule include targeting domains comprising, e.g., consisting of, SEQ ID NO: 98 and SEQ ID NO: 113, respectively. In an aspect, the first gRNA molecule and the second gRNA molecule include targeting domains comprising, e.g., consisting of, SEQ ID NO: 98 and SEQ ID NO: 99, respectively. In an aspect, the first gRNA molecule and the second gRNA molecule include targeting domains comprising, e.g., consisting of, SEQ ID NO: 98 and SEQ ID NO: 112, respectively. In an aspect, the first gRNA molecule and the second gRNA molecule include targeting domains comprising, e.g., consisting of, SEQ ID NO: 98 and SEQ ID NO: 1580, respectively. In an aspect, the first gRNA molecule and the second gRNA molecule include targeting domains comprising, e.g., consisting of, SEQ ID NO: 98 and SEQ ID NO: 106, respectively. In an aspect, the first gRNA molecule and the second gRNA molecule include targeting domains comprising, e.g., consisting of, SEQ ID NO: 98 and SEQ ID NO: 1503, respectively. In an aspect, the first gRNA molecule and the second gRNA molecule include targeting domains comprising, e.g., consisting of, SEQ ID NO: 98 and SEQ ID NO: 1589, respectively. In an aspect, the first gRNA molecule and the second gRNA molecule include targeting domains comprising, e.g., consisting of, SEQ ID NO: 98 and SEQ ID NO: 160, respectively. In an aspect, the first gRNA molecule and the second gRNA molecule include targeting domains comprising, e.g., consisting of, SEQ ID NO: 98 and SEQ ID NO: 1537, respectively. In an aspect, the first gRNA molecule and the second gRNA molecule include targeting domains comprising, e.g., consisting of, SEQ ID NO: 98 and SEQ ID NO: 159, respectively. In an aspect, the first gRNA molecule and the second gRNA molecule include targeting domains comprising, e.g., consisting of, SEQ ID NO: 98 and SEQ ID NO: 101, respectively. In an aspect, the first gRNA molecule and the second gRNA molecule include targeting domains comprising, e.g., consisting of, SEQ ID NO: 98 and SEQ ID NO: 162, respectively. In an aspect, the first gRNA molecule and the second gRNA molecule include targeting domains comprising, e.g., consisting of, SEQ ID NO: 98 and SEQ ID NO: 104, respectively. In an aspect, the first gRNA molecule and the second gRNA molecule include targeting domains comprising, e.g., consisting of, SEQ ID NO: 98 and SEQ ID NO: 138, respectively. In an aspect, the first gRNA molecule and the second gRNA molecule include targeting domains comprising, e.g., consisting of, SEQ ID NO: 98 and SEQ ID NO: 1536, respectively. In an aspect, the first gRNA molecule and the second gRNA molecule include targeting domains comprising, e.g., consisting of, SEQ ID NO: 98 and SEQ ID NO: 1539, respectively. In an aspect, the first gRNA molecule and the second gRNA molecule include targeting domains comprising, e.g., consisting of, SEQ ID NO: 98 and SEQ ID NO: 1585, respectively. In an aspect, the first gRNA molecule and the second gRNA molecule include targeting domains comprising, e.g., consisting of, SEQ ID NO: 1580 and SEQ ID NO: 165, respectively. In an aspect, the first gRNA molecule and the second gRNA molecule include targeting domains comprising, e.g., consisting of, SEQ ID NO: 1580 and SEQ ID NO: 113, respectively. In an aspect, the first gRNA molecule and the second gRNA molecule include targeting domains comprising, e.g., consisting of, SEQ ID NO: 1580 and SEQ ID NO: 99, respectively. In an aspect, the first gRNA molecule and the second gRNA molecule include targeting domains comprising, e.g., consisting of, SEQ ID NO: 1580 and SEQ ID NO: 112, respectively. In an aspect, the first gRNA molecule and the second gRNA molecule include targeting domains comprising, e.g., consisting of, SEQ ID NO: 1580 and SEQ ID NO: 98, respectively. In an aspect, the first gRNA molecule and the second gRNA molecule include targeting domains comprising, e.g., consisting of, SEQ ID NO: 1580 and SEQ ID NO: 106, respectively. In an aspect, the first gRNA molecule and the second gRNA molecule include targeting domains comprising, e.g., consisting of, SEQ ID NO: 1580 and SEQ ID NO: 1503, respectively. In an aspect, the first gRNA molecule and the second gRNA molecule include targeting domains comprising, e.g., consisting of, SEQ ID NO: 1580 and SEQ ID NO: 1589, respectively. In an aspect, the first gRNA molecule and the second gRNA molecule include targeting domains comprising, e.g., consisting of, SEQ ID NO: 1580 and SEQ ID NO: 160, respectively. In an aspect, the first gRNA molecule and the second gRNA molecule include targeting domains comprising, e.g., consisting of, SEQ ID NO: 1580 and SEQ ID NO: 1537, respectively. In an aspect, the first gRNA molecule and the second gRNA molecule include targeting domains comprising, e.g., consisting of, SEQ ID NO: 1580 and SEQ ID NO: 159, respectively. In an aspect, the first gRNA molecule and the second gRNA molecule include targeting domains comprising, e.g., consisting of, SEQ ID NO: 1580 and SEQ ID NO: 101, respectively. In an aspect, the first gRNA molecule and the second gRNA molecule include targeting domains comprising, e.g., consisting of, SEQ ID NO: 1580 and SEQ ID NO: 162, respectively. In an aspect, the first gRNA molecule and the second gRNA molecule include targeting domains comprising, e.g., consisting of, SEQ ID NO: 1580 and SEQ ID NO: 104, respectively. In an aspect, the first gRNA molecule and the second gRNA molecule include targeting domains comprising, e.g., consisting of, SEQ ID NO: 1580 and SEQ ID NO: 138, respectively. In an aspect, the first gRNA molecule and the second gRNA molecule include targeting domains comprising, e.g., consisting of, SEQ ID NO: 1580 and SEQ ID NO: 1536, respectively. In an aspect, the first gRNA molecule and the second gRNA molecule include targeting domains comprising, e.g., consisting of, SEQ ID NO: 1580 and SEQ ID NO: 1539, respectively. In an aspect, the first gRNA molecule and the second gRNA molecule include targeting domains comprising, e.g., consisting of, SEQ ID NO: 1580 and SEQ ID NO: 1585, respectively. In an aspect, the first gRNA molecule and the second gRNA molecule include targeting domains comprising, e.g., consisting of, SEQ ID NO: 106 and SEQ ID NO: 165, respectively. In an aspect, the first gRNA molecule and the second gRNA molecule include targeting domains comprising, e.g., consisting of, SEQ ID NO: 106 and SEQ ID NO: 113, respectively. In an aspect, the first gRNA molecule and the second gRNA molecule include targeting domains comprising, e.g., consisting of, SEQ ID NO: 106 and SEQ ID NO: 99, respectively. In an aspect, the first gRNA molecule and the second gRNA molecule include targeting domains comprising, e.g., consisting of, SEQ ID NO: 106 and SEQ ID NO: 112, respectively. In an aspect, the first gRNA molecule and the second gRNA molecule include targeting domains comprising, e.g., consisting of, SEQ ID NO: 106 and SEQ ID NO: 98, respectively. In an aspect, the first gRNA molecule and the second gRNA molecule include targeting domains comprising, e.g., consisting of, SEQ ID NO: 106 and SEQ ID NO: 1580, respectively. In an aspect, the first gRNA molecule and the second gRNA molecule include targeting domains comprising, e.g., consisting of, SEQ ID NO: 106 and SEQ ID NO: 1503, respectively. In an aspect, the first gRNA molecule and the second gRNA molecule include targeting domains comprising, e.g., consisting of, SEQ ID NO: 106 and SEQ ID NO: 1589, respectively. In an aspect, the first gRNA molecule and the second gRNA molecule include targeting domains comprising, e.g., consisting of, SEQ ID NO: 106 and SEQ ID NO: 160, respectively. In an aspect, the first gRNA molecule and the second gRNA molecule include targeting domains comprising, e.g., consisting of, SEQ ID NO: 106 and SEQ ID NO: 1537, respectively. In an aspect, the first gRNA molecule and the second gRNA molecule include targeting domains comprising, e.g., consisting of, SEQ ID NO: 106 and SEQ ID NO: 159, respectively. In an aspect, the first gRNA molecule and the second gRNA molecule include targeting domains comprising, e.g., consisting of, SEQ ID NO: 106 and SEQ ID NO: 101, respectively. In an aspect, the first gRNA molecule and the second gRNA molecule include targeting domains comprising, e.g., consisting of, SEQ ID NO: 106 and SEQ ID NO: 162, respectively. In an aspect, the first gRNA molecule and the second gRNA molecule include targeting domains comprising, e.g., consisting of, SEQ ID NO: 106 and SEQ ID NO: 104, respectively. In an aspect, the first gRNA molecule and the second gRNA molecule include targeting domains comprising, e.g., consisting of, SEQ ID NO: 106 and SEQ ID NO: 138, respectively. In an aspect, the first gRNA molecule and the second gRNA molecule include targeting domains comprising, e.g., consisting of, SEQ ID NO: 106 and SEQ ID NO: 1536, respectively. In an aspect, the first gRNA molecule and the second gRNA molecule include targeting domains comprising, e.g., consisting of, SEQ ID NO: 106 and SEQ ID NO: 1539, respectively. In an aspect, the first gRNA molecule and the second gRNA molecule include targeting domains comprising, e.g., consisting of, SEQ ID NO: 106 and SEQ ID NO: 1585, respectively. In an aspect, the first gRNA molecule and the second gRNA molecule include targeting domains comprising, e.g., consisting of, SEQ ID NO: 1503 and SEQ ID NO: 165, respectively. In an aspect, the first gRNA molecule and the second gRNA molecule include targeting domains comprising, e.g., consisting of, SEQ ID NO: 1503 and SEQ ID NO: 113, respectively. In an aspect, the first gRNA molecule and the second gRNA molecule include targeting domains comprising, e.g., consisting of, SEQ ID NO: 1503 and SEQ ID NO: 99, respectively. In an aspect, the first gRNA molecule and the second gRNA molecule include targeting domains comprising, e.g., consisting of, SEQ ID NO: 1503 and SEQ ID NO: 112, respectively. In an aspect, the first gRNA molecule and the second gRNA molecule include targeting domains comprising, e.g., consisting of, SEQ ID NO: 1503 and SEQ ID NO: 98, respectively. In an aspect, the first gRNA molecule and the second gRNA molecule include targeting domains comprising, e.g., consisting of, SEQ ID NO: 1503 and SEQ ID NO: 1580, respectively. In an aspect, the first gRNA molecule and the second gRNA molecule include targeting domains comprising, e.g., consisting of, SEQ ID NO: 1503 and SEQ ID NO: 106, respectively. In an aspect, the first gRNA molecule and the second gRNA molecule include targeting domains comprising, e.g., consisting of, SEQ ID NO: 1503 and SEQ ID NO: 1589, respectively. In an aspect, the first gRNA molecule and the second gRNA molecule include targeting domains comprising, e.g., consisting of, SEQ ID NO: 1503 and SEQ ID NO: 160, respectively. In an aspect, the first gRNA molecule and the second gRNA molecule include targeting domains comprising, e.g., consisting of, SEQ ID NO: 1503 and SEQ ID NO: 1537, respectively. In an aspect, the first gRNA molecule and the second gRNA molecule include targeting domains comprising, e.g., consisting of, SEQ ID NO: 1503 and SEQ ID NO: 159, respectively. In an aspect, the first gRNA molecule and the second gRNA molecule include targeting domains comprising, e.g., consisting of, SEQ ID NO: 1503 and SEQ ID NO: 101, respectively. In an aspect, the first gRNA molecule and the second gRNA molecule include targeting domains comprising, e.g., consisting of, SEQ ID NO: 1503 and SEQ ID NO: 162, respectively. In an aspect, the first gRNA molecule and the second gRNA molecule include targeting domains comprising, e.g., consisting of, SEQ ID NO: 1503 and SEQ ID NO: 104, respectively. In an aspect, the first gRNA molecule and the second gRNA molecule include targeting domains comprising, e.g., consisting of, SEQ ID NO: 1503 and SEQ ID NO: 138, respectively. In an aspect, the first gRNA molecule and the second gRNA molecule include targeting domains comprising, e.g., consisting of, SEQ ID NO: 1503 and SEQ ID NO: 1536, respectively. In an aspect, the first gRNA molecule and the second gRNA molecule include targeting domains comprising, e.g., consisting of, SEQ ID NO: 1503 and SEQ ID NO: 1539, respectively. In an aspect, the first gRNA molecule and the second gRNA molecule include targeting domains comprising, e.g., consisting of, SEQ ID NO: 1503 and SEQ ID NO: 1585, respectively. In an aspect, the first gRNA molecule and the second gRNA molecule include targeting domains comprising, e.g., consisting of, SEQ ID NO: 1589 and SEQ ID NO: 165, respectively. In an aspect, the first gRNA molecule and the second gRNA molecule include targeting domains comprising, e.g., consisting of, SEQ ID NO: 1589 and SEQ ID NO: 113, respectively. In an aspect, the first gRNA molecule and the second gRNA molecule include targeting domains comprising, e.g., consisting of, SEQ ID NO: 1589 and SEQ ID NO: 99, respectively. In an aspect, the first gRNA molecule and the second gRNA molecule include targeting domains comprising, e.g., consisting of, SEQ ID NO: 1589 and SEQ ID NO: 112, respectively. In an aspect, the first gRNA molecule and the second gRNA molecule include targeting domains comprising, e.g., consisting of, SEQ ID NO: 1589 and SEQ ID NO: 98, respectively. In an aspect, the first gRNA molecule and the second gRNA molecule include targeting domains comprising, e.g., consisting of, SEQ ID NO: 1589 and SEQ ID NO: 1580, respectively. In an aspect, the first gRNA molecule and the second gRNA molecule include targeting domains comprising, e.g., consisting of, SEQ ID NO: 1589 and SEQ ID NO: 106, respectively. In an aspect, the first gRNA molecule and the second gRNA molecule include targeting domains comprising, e.g., consisting of, SEQ ID NO: 1589 and SEQ ID NO: 1503, respectively. In an aspect, the first gRNA molecule and the second gRNA molecule include targeting domains comprising, e.g., consisting of, SEQ ID NO: 1589 and SEQ ID NO: 160, respectively. In an aspect, the first gRNA molecule and the second gRNA molecule include targeting domains comprising, e.g., consisting of, SEQ ID NO: 1589 and SEQ ID NO: 1537, respectively. In an aspect, the first gRNA molecule and the second gRNA molecule include targeting domains comprising, e.g., consisting of, SEQ ID NO: 1589 and SEQ ID NO: 159, respectively. In an aspect, the first gRNA molecule and the second gRNA molecule include targeting domains comprising, e.g., consisting of, SEQ ID NO: 1589 and SEQ ID NO: 101, respectively. In an aspect, the first gRNA molecule and the second gRNA molecule include targeting domains comprising, e.g., consisting of, SEQ ID NO: 1589 and SEQ ID NO: 162, respectively. In an aspect, the first gRNA molecule and the second gRNA molecule include targeting domains comprising, e.g., consisting of, SEQ ID NO: 1589 and SEQ ID NO: 104, respectively. In an aspect, the first gRNA molecule and the second gRNA molecule include targeting domains comprising, e.g., consisting of, SEQ ID NO: 1589 and SEQ ID NO: 138, respectively. In an aspect, the first gRNA molecule and the second gRNA molecule include targeting domains comprising, e.g., consisting of, SEQ ID NO: 1589 and SEQ ID NO: 1536, respectively. In an aspect, the first gRNA molecule and the second gRNA molecule include targeting domains comprising, e.g., consisting of, SEQ ID NO: 1589 and SEQ ID NO: 1539, respectively. In an aspect, the first gRNA molecule and the second gRNA molecule include targeting domains comprising, e.g., consisting of, SEQ ID NO: 1589 and SEQ ID NO: 1585, respectively. In an aspect, the first gRNA molecule and the second gRNA molecule include targeting domains comprising, e.g., consisting of, SEQ ID NO: 160 and SEQ ID NO: 165, respectively. In an aspect, the first gRNA molecule and the second gRNA molecule include targeting domains comprising, e.g., consisting of, SEQ ID NO: 160 and SEQ ID NO: 113, respectively. In an aspect, the first gRNA molecule and the second gRNA molecule include targeting domains comprising, e.g., consisting of, SEQ ID NO: 160 and SEQ ID NO: 99, respectively. In an aspect, the first gRNA molecule and the second gRNA molecule include targeting domains comprising, e.g., consisting of, SEQ ID NO: 160 and SEQ ID NO: 112, respectively. In an aspect, the first gRNA molecule and the second gRNA molecule include targeting domains comprising, e.g., consisting of, SEQ ID NO: 160 and SEQ ID NO: 98, respectively. In an aspect, the first gRNA molecule and the second gRNA molecule include targeting domains comprising, e.g., consisting of, SEQ ID NO: 160 and SEQ ID NO: 1580, respectively. In an aspect, the first gRNA molecule and the second gRNA molecule include targeting domains comprising, e.g., consisting of, SEQ ID NO: 160 and SEQ ID NO: 106, respectively. In an aspect, the first gRNA molecule and the second gRNA molecule include targeting domains comprising, e.g., consisting of, SEQ ID NO: 160 and SEQ ID NO: 1503, respectively. In an aspect, the first gRNA molecule and the second gRNA molecule include targeting domains comprising, e.g., consisting of, SEQ ID NO: 160 and SEQ ID NO: 1589, respectively. In an aspect, the first gRNA molecule and the second gRNA molecule include targeting domains comprising, e.g., consisting of, SEQ ID NO: 160 and SEQ ID NO: 1537, respectively. In an aspect, the first gRNA molecule and the second gRNA molecule include targeting domains comprising, e.g., consisting of, SEQ ID NO: 160 and SEQ ID NO: 159, respectively. In an aspect, the first gRNA molecule and the second gRNA molecule include targeting domains comprising, e.g., consisting of, SEQ ID NO: 160 and SEQ ID NO: 101, respectively. In an aspect, the first gRNA molecule and the second gRNA molecule include targeting domains comprising, e.g., consisting of, SEQ ID NO: 160 and SEQ ID NO: 162, respectively. In an aspect, the first gRNA molecule and the second gRNA molecule include targeting domains comprising, e.g., consisting of, SEQ ID NO: 160 and SEQ ID NO: 104, respectively. In an aspect, the first gRNA molecule and the second gRNA molecule include targeting domains comprising, e.g., consisting of, SEQ ID NO: 160 and SEQ ID NO: 138, respectively. In an aspect, the first gRNA molecule and the second gRNA molecule include targeting domains comprising, e.g., consisting of, SEQ ID NO: 160 and SEQ ID NO: 1536, respectively. In an aspect, the first gRNA molecule and the second gRNA molecule include targeting domains comprising, e.g., consisting of, SEQ ID NO: 160 and SEQ ID NO: 1539, respectively. In an aspect, the first gRNA molecule and the second gRNA molecule include targeting domains comprising, e.g., consisting of, SEQ ID NO: 160 and SEQ ID NO: 1585, respectively. In an aspect, the first gRNA molecule and the second gRNA molecule include targeting domains comprising, e.g., consisting of, SEQ ID NO: 1537 and SEQ ID NO: 165, respectively. In an aspect, the first gRNA molecule and the second gRNA molecule include targeting domains comprising, e.g., consisting of, SEQ ID NO: 1537 and SEQ ID NO: 113, respectively. In an aspect, the first gRNA molecule and the second gRNA molecule include targeting domains comprising, e.g., consisting of, SEQ ID NO: 1537 and SEQ ID NO: 99, respectively. In an aspect, the first gRNA molecule and the second gRNA molecule include targeting domains comprising, e.g., consisting of, SEQ ID NO: 1537 and SEQ ID NO: 112, respectively. In an aspect, the first gRNA molecule and the second gRNA molecule include targeting domains comprising, e.g., consisting of, SEQ ID NO: 1537 and SEQ ID NO: 98, respectively. In an aspect, the first gRNA molecule and the second gRNA molecule include targeting domains comprising, e.g., consisting of, SEQ ID NO: 1537 and SEQ ID NO: 1580, respectively. In an aspect, the first gRNA molecule and the second gRNA molecule include targeting domains comprising, e.g., consisting of, SEQ ID NO: 1537 and SEQ ID NO: 106, respectively. In an aspect, the first gRNA molecule and the second gRNA molecule include targeting domains comprising, e.g., consisting of, SEQ ID NO: 1537 and SEQ ID NO: 1503, respectively. In an aspect, the first gRNA molecule and the second gRNA molecule include targeting domains comprising, e.g., consisting of, SEQ ID NO: 1537 and SEQ ID NO: 1589, respectively. In an aspect, the first gRNA molecule and the second gRNA molecule include targeting domains comprising, e.g., consisting of, SEQ ID NO: 1537 and SEQ ID NO: 160, respectively. In an aspect, the first gRNA molecule and the second gRNA molecule include targeting domains comprising, e.g., consisting of, SEQ ID NO: 1537 and SEQ ID NO: 159, respectively. In an aspect, the first gRNA molecule and the second gRNA molecule include targeting domains comprising, e.g., consisting of, SEQ ID NO: 1537 and SEQ ID NO: 101, respectively. In an aspect, the first gRNA molecule and the second gRNA molecule include targeting domains comprising, e.g., consisting of, SEQ ID NO: 1537 and SEQ ID NO: 162, respectively. In an aspect, the first gRNA molecule and the second gRNA molecule include targeting domains comprising, e.g., consisting of, SEQ ID NO: 1537 and SEQ ID NO: 104, respectively. In an aspect, the first gRNA molecule and the second gRNA molecule include targeting domains comprising, e.g., consisting of, SEQ ID NO: 1537 and SEQ ID NO: 138, respectively. In an aspect, the first gRNA molecule and the second gRNA molecule include targeting domains comprising, e.g., consisting of, SEQ ID NO: 1537 and SEQ ID NO: 1536, respectively. In an aspect, the first gRNA molecule and the second gRNA molecule include targeting domains comprising, e.g., consisting of, SEQ ID NO: 1537 and SEQ ID NO: 1539, respectively. In an aspect, the first gRNA molecule and the second gRNA molecule include targeting domains comprising, e.g., consisting of, SEQ ID NO: 1537 and SEQ ID NO: 1585, respectively. In an aspect, the first gRNA molecule and the second gRNA molecule include targeting domains comprising, e.g., consisting of, SEQ ID NO: 159 and SEQ ID NO: 165, respectively. In an aspect, the first gRNA molecule and the second gRNA molecule include targeting domains comprising, e.g., consisting of, SEQ ID NO: 159 and SEQ ID NO: 113, respectively. In an aspect, the first gRNA molecule and the second gRNA molecule include targeting domains comprising, e.g., consisting of, SEQ ID NO: 159 and SEQ ID NO: 99, respectively. In an aspect, the first gRNA molecule and the second gRNA molecule include targeting domains comprising, e.g., consisting of, SEQ ID NO: 159 and SEQ ID NO: 112, respectively. In an aspect, the first gRNA molecule and the second gRNA molecule include targeting domains comprising, e.g., consisting of, SEQ ID NO: 159 and SEQ ID NO: 98, respectively. In an aspect, the first gRNA molecule and the second gRNA molecule include targeting domains comprising, e.g., consisting of, SEQ ID NO: 159 and SEQ ID NO: 1580, respectively. In an aspect, the first gRNA molecule and the second gRNA molecule include targeting domains comprising, e.g., consisting of, SEQ ID NO: 159 and SEQ ID NO: 106, respectively. In an aspect, the first gRNA molecule and the second gRNA molecule include targeting domains comprising, e.g., consisting of, SEQ ID NO: 159 and SEQ ID NO: 1503, respectively. In an aspect, the first gRNA molecule and the second gRNA molecule include targeting domains comprising, e.g., consisting of, SEQ ID NO: 159 and SEQ ID NO: 1589, respectively. In an aspect, the first gRNA molecule and the second gRNA molecule include targeting domains comprising, e.g., consisting of, SEQ ID NO: 159 and SEQ ID NO: 160, respectively. In an aspect, the first gRNA molecule and the second gRNA molecule include targeting domains comprising, e.g., consisting of, SEQ ID NO: 159 and SEQ ID NO: 1537, respectively. In an aspect, the first gRNA molecule and the second gRNA molecule include targeting domains comprising, e.g., consisting of, SEQ ID NO: 159 and SEQ ID NO: 101, respectively. In an aspect, the first gRNA molecule and the second gRNA molecule include targeting domains comprising, e.g., consisting of, SEQ ID NO: 159 and SEQ ID NO: 162, respectively. In an aspect, the first gRNA molecule and the second gRNA molecule include targeting domains comprising, e.g., consisting of, SEQ ID NO: 159 and SEQ ID NO: 104, respectively. In an aspect, the first gRNA molecule and the second gRNA molecule include targeting domains comprising, e.g., consisting of, SEQ ID NO: 159 and SEQ ID NO: 138, respectively. In an aspect, the first gRNA molecule and the second gRNA molecule include targeting domains comprising, e.g., consisting of, SEQ ID NO: 159 and SEQ ID NO: 1536, respectively. In an aspect, the first gRNA molecule and the second gRNA molecule include targeting domains comprising, e.g., consisting of, SEQ ID NO: 159 and SEQ ID NO: 1539, respectively. In an aspect, the first gRNA molecule and the second gRNA molecule include targeting domains comprising, e.g., consisting of, SEQ ID NO: 159 and SEQ ID NO: 1585, respectively. In an aspect, the first gRNA molecule and the second gRNA molecule include targeting domains comprising, e.g., consisting of, SEQ ID NO: 101 and SEQ ID NO: 165, respectively. In an aspect, the first gRNA molecule and the second gRNA molecule include targeting domains comprising, e.g., consisting of, SEQ ID NO: 101 and SEQ ID NO: 113, respectively. In an aspect, the first gRNA molecule and the second gRNA molecule include targeting domains comprising, e.g., consisting of, SEQ ID NO: 101 and SEQ ID NO: 99, respectively. In an aspect, the first gRNA molecule and the second gRNA molecule include targeting domains comprising, e.g., consisting of, SEQ ID NO: 101 and SEQ ID NO: 112, respectively. In an aspect, the first gRNA molecule and the second gRNA molecule include targeting domains comprising, e.g., consisting of, SEQ ID NO: 101 and SEQ ID NO: 98, respectively. In an aspect, the first gRNA molecule and the second gRNA molecule include targeting domains comprising, e.g., consisting of, SEQ ID NO: 101 and SEQ ID NO: 1580, respectively. In an aspect, the first gRNA molecule and the second gRNA molecule include targeting domains comprising, e.g., consisting of, SEQ ID NO: 101 and SEQ ID NO: 106, respectively. In an aspect, the first gRNA molecule and the second gRNA molecule include targeting domains comprising, e.g., consisting of, SEQ ID NO: 101 and SEQ ID NO: 1503, respectively. In an aspect, the first gRNA molecule and the second gRNA molecule include targeting domains comprising, e.g., consisting of, SEQ ID NO: 101 and SEQ ID NO: 1589, respectively. In an aspect, the first gRNA molecule and the second gRNA molecule include targeting domains comprising, e.g., consisting of, SEQ ID NO: 101 and SEQ ID NO: 160, respectively. In an aspect, the first gRNA molecule and the second gRNA molecule include targeting domains comprising, e.g., consisting of, SEQ ID NO: 101 and SEQ ID NO: 1537, respectively. In an aspect, the first gRNA molecule and the second gRNA molecule include targeting domains comprising, e.g., consisting of, SEQ ID NO: 101 and SEQ ID NO: 159, respectively. In an aspect, the first gRNA molecule and the second gRNA molecule include targeting domains comprising, e.g., consisting of, SEQ ID NO: 101 and SEQ ID NO: 162, respectively. In an aspect, the first gRNA molecule and the second gRNA molecule include targeting domains comprising, e.g., consisting of, SEQ ID NO: 101 and SEQ ID NO: 104, respectively. In an aspect, the first gRNA molecule and the second gRNA molecule include targeting domains comprising, e.g., consisting of, SEQ ID NO: 101 and SEQ ID NO: 138, respectively. In an aspect, the first gRNA molecule and the second gRNA molecule include targeting domains comprising, e.g., consisting of, SEQ ID NO: 101 and SEQ ID NO: 1536, respectively. In an aspect, the first gRNA molecule and the second gRNA molecule include targeting domains comprising, e.g., consisting of, SEQ ID NO: 101 and SEQ ID NO: 1539, respectively. In an aspect, the first gRNA molecule and the second gRNA molecule include targeting domains comprising, e.g., consisting of, SEQ ID NO: 101 and SEQ ID NO: 1585, respectively.

[0463] In an aspect, the first gRNA molecule and the second gRNA molecule include targeting domains comprising, e.g., consisting of, SEQ ID NO: 162 and SEQ ID NO: 165, respectively. In an aspect, the first gRNA molecule and the second gRNA molecule include targeting domains comprising, e.g., consisting of, SEQ ID NO: 162 and SEQ ID NO: 113, respectively. In an aspect, the first gRNA molecule and the second gRNA molecule include targeting domains comprising, e.g., consisting of, SEQ ID NO: 162 and SEQ ID NO: 99, respectively. In an aspect, the first gRNA molecule and the second gRNA molecule include targeting domains comprising, e.g., consisting of, SEQ ID NO: 162 and SEQ ID NO: 112, respectively. In an aspect, the first gRNA molecule and the second gRNA molecule include targeting domains comprising, e.g., consisting of, SEQ ID NO: 162 and SEQ ID NO: 98, respectively. In an aspect, the first gRNA molecule and the second gRNA molecule include targeting domains comprising, e.g., consisting of, SEQ ID NO: 162 and SEQ ID NO: 1580, respectively. In an aspect, the first gRNA molecule and the second gRNA molecule include targeting domains comprising, e.g., consisting of, SEQ ID NO: 162 and SEQ ID NO: 106, respectively. In an aspect, the first gRNA molecule and the second gRNA molecule include targeting domains comprising, e.g., consisting of, SEQ ID NO: 162 and SEQ ID NO: 1503, respectively. In an aspect, the first gRNA molecule and the second gRNA molecule include targeting domains comprising, e.g., consisting of, SEQ ID NO: 162 and SEQ ID NO: 1589, respectively. In an aspect, the first gRNA molecule and the second gRNA molecule include targeting domains comprising, e.g., consisting of, SEQ ID NO: 162 and SEQ ID NO: 160, respectively. In an aspect, the first gRNA molecule and the second gRNA molecule include targeting domains comprising, e.g., consisting of, SEQ ID NO: 162 and SEQ ID NO: 1537, respectively. In an aspect, the first gRNA molecule and the second gRNA molecule include targeting domains comprising, e.g., consisting of, SEQ ID NO: 162 and SEQ ID NO: 159, respectively. In an aspect, the first gRNA molecule and the second gRNA molecule include targeting domains comprising, e.g., consisting of, SEQ ID NO: 162 and SEQ ID NO: 101, respectively. In an aspect, the first gRNA molecule and the second gRNA molecule include targeting domains comprising, e.g., consisting of, SEQ ID NO: 104 and SEQ ID NO: 165, respectively. In an aspect, the first gRNA molecule and the second gRNA molecule include targeting domains comprising, e.g., consisting of, SEQ ID NO: 104 and SEQ ID NO: 113, respectively. In an aspect, the first gRNA molecule and the second gRNA molecule include targeting domains comprising, e.g., consisting of, SEQ ID NO: 104 and SEQ ID NO: 99, respectively. In an aspect, the first gRNA molecule and the second gRNA molecule include targeting domains comprising, e.g., consisting of, SEQ ID NO: 104 and SEQ ID NO: 112, respectively. In an aspect, the first gRNA molecule and the second gRNA molecule include targeting domains comprising, e.g., consisting of, SEQ ID NO: 104 and SEQ ID NO: 98, respectively. In an aspect, the first gRNA molecule and the second gRNA molecule include targeting domains comprising, e.g., consisting of, SEQ ID NO: 104 and SEQ ID NO: 1580, respectively. In an aspect, the first gRNA molecule and the second gRNA molecule include targeting domains comprising, e.g., consisting of, SEQ ID NO: 104 and SEQ ID NO: 106, respectively. In an aspect, the first gRNA molecule and the second gRNA molecule include targeting domains comprising, e.g., consisting of, SEQ ID NO: 104 and SEQ ID NO: 1503, respectively. In an aspect, the first gRNA molecule and the second gRNA molecule include targeting domains comprising, e.g., consisting of, SEQ ID NO: 104 and SEQ ID NO: 1589, respectively. In an aspect, the first gRNA molecule and the second gRNA molecule include targeting domains comprising, e.g., consisting of, SEQ ID NO: 104 and SEQ ID NO: 160, respectively. In an aspect, the first gRNA molecule and the second gRNA molecule include targeting domains comprising, e.g., consisting of, SEQ ID NO: 104 and SEQ ID NO: 1537, respectively. In an aspect, the first gRNA molecule and the second gRNA molecule include targeting domains comprising, e.g., consisting of, SEQ ID NO: 104 and SEQ ID NO: 159, respectively. In an aspect, the first gRNA molecule and the second gRNA molecule include targeting domains comprising, e.g., consisting of, SEQ ID NO: 104 and SEQ ID NO: 101, respectively. In an aspect, the first gRNA molecule and the second gRNA molecule include targeting domains comprising, e.g., consisting of, SEQ ID NO: 104 and SEQ ID NO: 162, respectively. In an aspect, the first gRNA molecule and the second gRNA molecule include targeting domains comprising, e.g., consisting of, SEQ ID NO: 104 and SEQ ID NO: 138, respectively. In an aspect, the first gRNA molecule and the second gRNA molecule include targeting domains comprising, e.g., consisting of, SEQ ID NO: 104 and SEQ ID NO: 1536, respectively. In an aspect, the first gRNA molecule and the second gRNA molecule include targeting domains comprising, e.g., consisting of, SEQ ID NO: 104 and SEQ ID NO: 1539, respectively. In an aspect, the first gRNA molecule and the second gRNA molecule include targeting domains comprising, e.g., consisting of, SEQ ID NO: 104 and SEQ ID NO: 1585, respectively. In an aspect, the first gRNA molecule and the second gRNA molecule include targeting domains comprising, e.g., consisting of, SEQ ID NO: 138 and SEQ ID NO: 165, respectively. In an aspect, the first gRNA molecule and the second gRNA molecule include targeting domains comprising, e.g., consisting of, SEQ ID NO: 138 and SEQ ID NO: 113, respectively. In an aspect, the first gRNA molecule and the second gRNA molecule include targeting domains comprising, e.g., consisting of, SEQ ID NO: 138 and SEQ ID NO: 99, respectively. In an aspect, the first gRNA molecule and the second gRNA molecule include targeting domains comprising, e.g., consisting of, SEQ ID NO: 138 and SEQ ID NO: 112, respectively. In an aspect, the first gRNA molecule and the second gRNA molecule include targeting domains comprising, e.g., consisting of, SEQ ID NO: 138 and SEQ ID NO: 98, respectively. In an aspect, the first gRNA molecule and the second gRNA molecule include targeting domains comprising, e.g., consisting of, SEQ ID NO: 138 and SEQ ID NO: 1580, respectively. In an aspect, the first gRNA molecule and the second gRNA molecule include targeting domains comprising, e.g., consisting of, SEQ ID NO: 138 and SEQ ID NO: 106, respectively. In an aspect, the first gRNA molecule and the second gRNA molecule include targeting domains comprising, e.g., consisting of, SEQ ID NO: 138 and SEQ ID NO: 1503, respectively. In an aspect, the first gRNA molecule and the second gRNA molecule include targeting domains comprising, e.g., consisting of, SEQ ID NO: 138 and SEQ ID NO: 1589, respectively. In an aspect, the first gRNA molecule and the second gRNA molecule include targeting domains comprising, e.g., consisting of, SEQ ID NO: 138 and SEQ ID NO: 160, respectively. In an aspect, the first gRNA molecule and the second gRNA molecule include targeting domains comprising, e.g., consisting of, SEQ ID NO: 138 and SEQ ID NO: 1537, respectively. In an aspect, the first gRNA molecule and the second gRNA molecule include targeting domains comprising, e.g., consisting of, SEQ ID NO: 138 and SEQ ID NO: 159, respectively. In an aspect, the first gRNA molecule and the second gRNA molecule include targeting domains comprising, e.g., consisting of, SEQ ID NO: 138 and SEQ ID NO: 101, respectively. In an aspect, the first gRNA molecule and the second gRNA molecule include targeting domains comprising, e.g., consisting of, SEQ ID NO: 138 and SEQ ID NO: 162, respectively. In an aspect, the first gRNA molecule and the second gRNA molecule include targeting domains comprising, e.g., consisting of, SEQ ID NO: 138 and SEQ ID NO: 104, respectively. In an aspect, the first gRNA molecule and the second gRNA molecule include targeting domains comprising, e.g., consisting of, SEQ ID NO: 138 and SEQ ID NO: 1536, respectively. In an aspect, the first gRNA molecule and the second gRNA molecule include targeting domains comprising, e.g., consisting of, SEQ ID NO: 138 and SEQ ID NO: 1539, respectively. In an aspect, the first gRNA molecule and the second gRNA molecule include targeting domains comprising, e.g., consisting of, SEQ ID NO: 138 and SEQ ID NO: 1585, respectively.

[0464] In an aspect, the first gRNA molecule and the second gRNA molecule include targeting domains comprising, e.g., consisting of, SEQ ID NO: 1536 and SEQ ID NO: 165, respectively. In an aspect, the first gRNA molecule and the second gRNA molecule include targeting domains comprising, e.g., consisting of, SEQ ID NO: 1536 and SEQ ID NO: 113, respectively. In an aspect, the first gRNA molecule and the second gRNA molecule include targeting domains comprising, e.g., consisting of, SEQ ID NO: 1536 and SEQ ID NO: 99, respectively. In an aspect, the first gRNA molecule and the second gRNA molecule include targeting domains comprising, e.g., consisting of, SEQ ID NO: 1536 and SEQ ID NO: 112, respectively. In an aspect, the first gRNA molecule and the second gRNA molecule include targeting domains comprising, e.g., consisting of, SEQ ID NO: 1536 and SEQ ID NO: 98, respectively. In an aspect, the first gRNA molecule and the second gRNA molecule include targeting domains comprising, e.g., consisting of, SEQ ID NO: 1536 and SEQ ID NO: 1580, respectively. In an aspect, the first gRNA molecule and the second gRNA molecule include targeting domains comprising, e.g., consisting of, SEQ ID NO: 1536 and SEQ ID NO: 106, respectively. In an aspect, the first gRNA molecule and the second gRNA molecule include targeting domains comprising, e.g., consisting of, SEQ ID NO: 1536 and SEQ ID NO: 1503, respectively. In an aspect, the first gRNA molecule and the second gRNA molecule include targeting domains comprising, e.g., consisting of, SEQ ID NO: 1536 and SEQ ID NO: 1589, respectively. In an aspect, the first gRNA molecule and the second gRNA molecule include targeting domains comprising, e.g., consisting of, SEQ ID NO: 1536 and SEQ ID NO: 160, respectively. In an aspect, the first gRNA molecule and the second gRNA molecule include targeting domains comprising, e.g., consisting of, SEQ ID NO: 1536 and SEQ ID NO: 1537, respectively. In an aspect, the first gRNA molecule and the second gRNA molecule include targeting domains comprising, e.g., consisting of, SEQ ID NO: 1536 and SEQ ID NO: 159, respectively. In an aspect, the first gRNA molecule and the second gRNA molecule include targeting domains comprising, e.g., consisting of, SEQ ID NO: 1536 and SEQ ID NO: 101, respectively. In an aspect, the first gRNA molecule and the second gRNA molecule include targeting domains comprising, e.g., consisting of, SEQ ID NO: 1536 and SEQ ID NO: 162, respectively. In an aspect, the first gRNA molecule and the second gRNA molecule include targeting domains comprising, e.g., consisting of, SEQ ID NO: 1536 and SEQ ID NO: 104, respectively. In an aspect, the first gRNA molecule and the second gRNA molecule include targeting domains comprising, e.g., consisting of, SEQ ID NO: 1536 and SEQ ID NO: 138, respectively. In an aspect, the first gRNA molecule and the second gRNA molecule include targeting domains comprising, e.g., consisting of, SEQ ID NO: 1536 and SEQ ID NO: 1539, respectively. In an aspect, the first gRNA molecule and the second gRNA molecule include targeting domains comprising, e.g., consisting of, SEQ ID NO: 1536 and SEQ ID NO: 1585, respectively. In an aspect, the first gRNA molecule and the second gRNA molecule include targeting domains comprising, e.g., consisting of, SEQ ID NO: 1539 and SEQ ID NO: 165, respectively. In an aspect, the first gRNA molecule and the second gRNA molecule include targeting domains comprising, e.g., consisting of, SEQ ID NO: 1539 and SEQ ID NO: 113, respectively. In an aspect, the first gRNA molecule and the second gRNA molecule include targeting domains comprising, e.g., consisting of, SEQ ID NO: 1539 and SEQ ID NO: 99, respectively. In an aspect, the first gRNA molecule and the second gRNA molecule include targeting domains comprising, e.g., consisting of, SEQ ID NO: 1539 and SEQ ID NO: 112, respectively. In an aspect, the first gRNA molecule and the second gRNA molecule include targeting domains comprising, e.g., consisting of, SEQ ID NO: 1539 and SEQ ID NO: 98, respectively. In an aspect, the first gRNA molecule and the second gRNA molecule include targeting domains comprising, e.g., consisting of, SEQ ID NO: 1539 and SEQ ID NO: 1580, respectively. In an aspect, the first gRNA molecule and the second gRNA molecule include targeting domains comprising, e.g., consisting of, SEQ ID NO: 1539 and SEQ ID NO: 106, respectively. In an aspect, the first gRNA molecule and the second gRNA molecule include targeting domains comprising, e.g., consisting of, SEQ ID NO: 1539 and SEQ ID NO: 1503, respectively. In an aspect, the first gRNA molecule and the second gRNA molecule include targeting domains comprising, e.g., consisting of, SEQ ID NO: 1539 and SEQ ID NO: 1589, respectively. In an aspect, the first gRNA molecule and the second gRNA molecule include targeting domains comprising, e.g., consisting of, SEQ ID NO: 1539 and SEQ ID NO: 160, respectively. In an aspect, the first gRNA molecule and the second gRNA molecule include targeting domains comprising, e.g., consisting of, SEQ ID NO: 1539 and SEQ ID NO: 1537, respectively. In an aspect, the first gRNA molecule and the second gRNA molecule include targeting domains comprising, e.g., consisting of, SEQ ID NO: 1539 and SEQ ID NO: 159, respectively. In an aspect, the first gRNA molecule and the second gRNA molecule include targeting domains comprising, e.g., consisting of, SEQ ID NO: 1539 and SEQ ID NO: 101, respectively. In an aspect, the first gRNA molecule and the second gRNA molecule include targeting domains comprising, e.g., consisting of, SEQ ID NO: 1539 and SEQ ID NO: 162, respectively. In an aspect, the first gRNA molecule and the second gRNA molecule include targeting domains comprising, e.g., consisting of, SEQ ID NO: 1539 and SEQ ID NO: 104, respectively. In an aspect, the first gRNA molecule and the second gRNA molecule include targeting domains comprising, e.g., consisting of, SEQ ID NO: 1539 and SEQ ID NO: 138, respectively. In an aspect, the first gRNA molecule and the second gRNA molecule include targeting domains comprising, e.g., consisting of, SEQ ID NO: 1539 and SEQ ID NO: 1536, respectively. In an aspect, the first gRNA molecule and the second gRNA molecule include targeting domains comprising, e.g., consisting of, SEQ ID NO: 1539 and SEQ ID NO: 1585, respectively. In an aspect, the first gRNA molecule and the second gRNA molecule include targeting domains comprising, e.g., consisting of, SEQ ID NO: 1585 and SEQ ID NO: 165, respectively. In an aspect, the first gRNA molecule and the second gRNA molecule include targeting domains comprising, e.g., consisting of, SEQ ID NO: 1585 and SEQ ID NO: 113, respectively. In an aspect, the first gRNA molecule and the second gRNA molecule include targeting domains comprising, e.g., consisting of, SEQ ID NO: 1585 and SEQ ID NO: 99, respectively. In an aspect, the first gRNA molecule and the second gRNA molecule include targeting domains comprising, e.g., consisting of, SEQ ID NO: 1585 and SEQ ID NO: 112, respectively. In an aspect, the first gRNA molecule and the second gRNA molecule include targeting domains comprising, e.g., consisting of, SEQ ID NO: 1585 and SEQ ID NO: 98, respectively. In an aspect, the first gRNA molecule and the second gRNA molecule include targeting domains comprising, e.g., consisting of, SEQ ID NO: 1585 and SEQ ID NO: 1580, respectively. In an aspect, the first gRNA molecule and the second gRNA molecule include targeting domains comprising, e.g., consisting of, SEQ ID NO: 1585 and SEQ ID NO: 106, respectively. In an aspect, the first gRNA molecule and the second gRNA molecule include targeting domains comprising, e.g., consisting of, SEQ ID NO: 1585 and SEQ ID NO: 1503, respectively. In an aspect, the first gRNA molecule and the second gRNA molecule include targeting domains comprising, e.g., consisting of, SEQ ID NO: 1585 and SEQ ID NO: 1589, respectively. In an aspect, the first gRNA molecule and the second gRNA molecule include targeting domains comprising, e.g., consisting of, SEQ ID NO: 1585 and SEQ ID NO: 160, respectively. In an aspect, the first gRNA molecule and the second gRNA molecule include targeting domains comprising, e.g., consisting of, SEQ ID NO: 1585 and SEQ ID NO: 1537, respectively. In an aspect, the first gRNA molecule and the second gRNA molecule include targeting domains comprising, e.g., consisting of, SEQ ID NO: 1585 and SEQ ID NO: 159, respectively. In an aspect, the first gRNA molecule and the second gRNA molecule include targeting domains comprising, e.g., consisting of, SEQ ID NO: 1585 and SEQ ID NO: 101, respectively. In an aspect, the first gRNA molecule and the second gRNA molecule include targeting domains comprising, e.g., consisting of, SEQ ID NO: 1585 and SEQ ID NO: 162, respectively. In an aspect, the first gRNA molecule and the second gRNA molecule include targeting domains comprising, e.g., consisting of, SEQ ID NO: 1585 and SEQ ID NO: 104, respectively. In an aspect, the first gRNA molecule and the second gRNA molecule include targeting domains comprising, e.g., consisting of, SEQ ID NO: 1585 and SEQ ID NO: 138, respectively. In an aspect, the first gRNA molecule and the second gRNA molecule include targeting domains comprising, e.g., consisting of, SEQ ID NO: 1585 and SEQ ID NO: 1536, respectively. In an aspect, the first gRNA molecule and the second gRNA molecule include targeting domains comprising, e.g., consisting of, SEQ ID NO: 1585 and SEQ ID NO: 1539, respectively.

TABLE 7
Preferred Guide RNA Targeting Domains directed to the +58
Enhancer Region of the BCL11a Gene (i.e., to a BCL11a Enhancer)

| | Exon/ | | | | SEQ ID |
|---|---|---|---|---|---|
| Id. | Feature | Strand | Targeting domain | Locations | NO: |
| CR00242 | 58 | + | UAUGCAAUUUUUGCCAAGAU | Chr2: 60494419-60494441 | 182 |
| CR00243 | 58 | + | UUUUGCCAAGAUGGGAGUAU | Chr2: 60494427-60494449 | 183 |
| CR00244 | 58 | + | UUUGCCAAGAUGGGAGUAUG | Chr2: 60494428-60494450 | 184 |
| CR00245 | 58 | + | UCAGUGAGAUGAGAUAUCAA | Chr2: 60494477-60494499 | 185 |
| CR00246 | 58 | + | CAGUGAGAUGAGAUAUCAAA | Chr2: 60494478-60494500 | 186 |
| CR00247 | 58 | + | CCAUCUCCCUAAUCUCCAAU | Chr2: 60494518-60494540 | 187 |
| CR00248 | 58 | − | CCAAUUGGAGAUUAGGGAGA | Chr2: 60494518-60494540 | 188 |
| CR00249 | 58 | − | GCUUUGCCAAUUGGAGAUUA | Chr2: 60494524-60494546 | 189 |
| CR00250 | 58 | − | GGCUUUGCCAAUUGGAGAUU | Chr2: 60494525-60494547 | 190 |
| CR00251 | 58 | + | AAUUGGCAAAGCCAGACUUG | Chr2: 60494535-60494557 | 191 |
| CR00252 | 58 | − | AGUCUGUAUUGCCCCAAGUC | Chr2: 60494546-60494568 | 192 |
| CR00253 | 58 | + | AGACUUGGGGCAAUACAGAC | Chr2: 60494548-60494570 | 193 |
| CR00255 | 58 | − | ACAUUUGGUGAUAAAUCAUU | Chr2: 60494602-60494624 | 194 |
| CR00256 | 58 | + | CCAAAUGUUCUUUCUUCAGC | Chr2: 60494617-60494639 | 195 |
| CR00257 | 58 | + | AUAAUAGUAUAUGCUUCAUA | Chr2: 60494676-60494698 | 196 |
| CR00258 | 58 | − | CGGAGCACUUACUCUGCUCU | Chr2: 60494737-60494759 | 197 |
| CR00259 | 58 | − | AGCAUUUUAGUUCACAAGCU | Chr2: 60494757-60494779 | 198 |
| CR00260 | 58 | − | UGUAACUAAUAAAUACCAGG | Chr2: 60494781-60494803 | 199 |
| CR00261 | 58 | − | AGGUGUAACUAAUAAAUACC | Chr2: 60494784-60494806 | 200 |
| CR00264 | 58 | − | UCUGACCCAAACUAGGAAUU | Chr2: 60494836-60494858 | 201 |
| CR00266 | 58 | + | AAGGAAAAGAAUAUGACGUC | Chr2: 60494883-60494905 | 202 |
| CR00267 | 58 | + | AGGAAAAGAAUAUGACGUCA | Chr2: 60494884-60494906 | 203 |
| CR00268 | 58 | + | GGAAAAGAAUAUGACGUCAG | Chr2: 60494885-60494907 | 204 |
| CR00269 | 58 | + | GAAAAGAAUAUGACGUCAGG | Chr2: 60494886-60494908 | 205 |
| CR00270 | 58 | + | UCAGGGGGAGGCAAGUCAGU | Chr2: 60494901-60494923 | 206 |
| CR00271 | 58 | + | CAGGGGGAGGCAAGUCAGUU | Chr2: 60494902-60494924 | 207 |
| CR00272 | 58 | | AUCACAUAUAGGCACCUAUC | Chr2: 60494939-60494961 | 208 |
| CR00273 | 58 | | CAGGUACCAGCUACUGUGUU | Chr2: 60494939-60494961 | 209 |
| CR00274 | 58 | | ACUAUCCACGGAUAUACACU | Chr2: 60494939-60494961 | 210 |
| CR00275 | 58 | + | CACAGUAGCUGGUACCUGAU | Chr2: 60494939-60494961 | 211 |
| CR00276 | 58 | − | AUCACAUAUAGGCACCUAUC | Chr2: 60494953-60494975 | 212 |
| CR00277 | 58 | + | UGAUAGGUGCCUAUAUGUGA | Chr2: 60494955-60494977 | 213 |
| CR00278 | 58 | + | AGGUGCCUAUAUGUGAUGGA | Chr2: 60494959-60494981 | 214 |
| CR00279 | 58 | + | GGUGCCUAUAUGUGAUGGAU | Chr2: 60494960-60494982 | 215 |
| CR00280 | 58 | − | UCCACCCAUCCAUCACAUAU | Chr2: 60494964-60494986 | 216 |
| CR00281 | 58 | + | ACAGCCCGACAGAUGAAAAA | Chr2: 60494986-60495008 | 217 |
| CR00282 | 58 | + | AUGAAAAAUGGACAAUUAUG | Chr2: 60494998-60495020 | 218 |
| CR00283 | 58 | + | AAAAAUGGACAAUUAUGAGG | Chr2: 60495001-60495023 | 219 |
| CR00284 | 58 | + | AAAAUGGACAAUUAUGAGGA | Chr2: 60495002-60495024 | 220 |
| CR00285 | 58 | + | AAAUGGACAAUUAUGAGGAG | Chr2: 60495003-60495025 | 221 |
| CR00286 | 58 | + | GAGGAGGGGAGAGUGCAGAC | Chr2: 60495017-60495039 | 222 |
| CR00287 | 58 | + | AGGAGGGGAGAGUGCAGACA | Chr2: 60495018-60495040 | 223 |
| CR00288 | 58 | + | CUUCACCUCCUUUACAAUUU | Chr2: 60495045-60495067 | 224 |
| CR00289 | 58 | + | UUCACCUCCUUUACAAUUUU | Chr2: 60495046-60495068 | 225 |
| CR00290 | 58 | − | GACUCCCAAAAUUGUAAAGG | Chr2: 60495050-60495072 | 226 |
| CR00291 | 58 | − | GUGGACUCCCAAAAUUGUAA | Chr2: 60495053-60495075 | 227 |
| CR00292 | 58 | + | UUUUGGGAGUCCACACGGCA | Chr2: 60495062-60495084 | 228 |
| CR00293 | 58 | − | AAUUUGUAUGCCAUGCCGUG | Chr2: 60495072-60495094 | 229 |
| CR00294 | 58 | + | CCAAGAGAGCCUUCCGAAAG | Chr2: 60495135-60495157 | 230 |
| CR00295 | 58 | − | CCAGGGGGGCCUCUUUCGGA | Chr2: 60495144-60495166 | 231 |
| CR00296 | 58 | + | CCUUCCGAAAGAGGCCCCCC | Chr2: 60495144-60495166 | 232 |
| CR00297 | 58 | + | CUUCCGAAAGAGGCCCCCCU | Chr2: 60495145-60495167 | 233 |
| CR00298 | 58 | + | AAGAGGCCCCCCUGGGCAAA | Chr2: 60495152-60495174 | 234 |
| CR00299 | 58 | − | CGGUGGCCGUUUGCCCAGGG | Chr2: 60495158-60495180 | 235 |
| CR00300 | 58 | − | UCGGUGGCCGUUUGCCCAGG | Chr2: 60495159-60495181 | 236 |
| CR00301 | 58 | − | AUCGGUGGCCGUUUGCCCAG | Chr2: 60495160-60495182 | 237 |
| CR00302 | 58 | − | CAUCGGUGGCCGUUUGCCCA | Chr2: 60495161-60495183 | 238 |
| CR00303 | 58 | + | CCUGGGCAAACGGCCACCGA | Chr2: 60495162-60495184 | 239 |
| CR00304 | 58 | − | CCAUCGGUGGCCGUUUGCCC | Chr2: 60495162-60495184 | 240 |
| CR00305 | 58 | + | GCAAACGGCCACCGAUGGAG | Chr2: 60495167-60495189 | 241 |
| CR00306 | 58 | − | CUGGCAGACCUCUCCAUCGG | Chr2: 60495175-60495197 | 242 |
| CR00307 | 58 | − | GGACUGGCAGACCUCUCCAU | Chr2: 60495178-60495200 | 243 |
| CR00308 | 58 | − | UCUGAUUAGGGUGGGGGCGU | Chr2: 60495213-60495235 | 244 |
| CR00309 | 58 | + | CACGCCCCCACCCUAAUCAG | Chr2: 60495215-60495237 | 245 |
| CR00310 | 58 | − | UUGGCCUCUGAUUAGGGUGG | Chr2: 60495219-60495241 | 246 |
| CR00311 | 58 | − | UUUGGCCUCUGAUUAGGGUG | Chr2: 60495220-60495242 | 247 |
| CR00312 | 58 | − | GUUUGGCCUCUGAUUAGGGU | Chr2: 60495221-60495243 | 248 |
| CR00313 | 58 | − | GGUUUGGCCUCUGAUUAGGG | Chr2: 60495222-60495244 | 249 |
| CR00314 | 58 | − | AAGGGUUUGGCCUCUGAUUA | Chr2: 60495225-60495247 | 250 |
| CR00315 | 58 | − | GAAGGGUUUGGCCUCUGAUU | Chr2: 60495226-60495248 | 251 |
| CR00316 | 58 | − | UUGCUUUUAUCACAGGCUCC | Chr2: 60495248-60495270 | 252 |
| CR00317 | 58 | − | CUAACAGUUGCUUUUAUCAC | Chr2: 60495255-60495277 | 253 |
| CR00318 | 58 | + | CUUCAAAGUUGUAUUGACCC | Chr2: 60495293-60495315 | 254 |
| CR00319 | 58 | − | ACUCUUAGACAUAACACACC | Chr2: 60495311-60495333 | 255 |
| CR00320 | 58 | + | UAGAUGCCAUAUCUCUUUUC | Chr2: 60495333-60495355 | 256 |
| CR00321 | 58 | − | CAUAGGCCAGAAAAGAGAUA | Chr2: 60495339-60495361 | 257 |
| CR00322 | 58 | + | GGCCUAUGUUAUUACCUGUA | Chr2: 60495354-60495376 | 258 |
| CR00323 | 58 | − | GUCCAUACAGGUAAUAACAU | Chr2: 60495356-60495378 | 259 |
| CR00324 | 58 | + | UACCUGUAUGGACUUUGCAC | Chr2: 60495366-60495388 | 260 |
| CR00325 | 58 | − | UUCCAGUGCAAAGUCCAUAC | Chr2: 60495368-60495390 | 261 |
| CR00326 | 58 | + | UGCUCUUACUUAUGCACACC | Chr2: 60495400-60495422 | 262 |
| CR00327 | 58 | + | GCUCUUACUUAUGCACACCU | Chr2: 60495401-60495423 | 263 |
| CR00328 | 58 | + | CUCUUACUUAUGCACACCUG | Chr2: 60495402-60495424 | 264 |
| CR00329 | 58 | − | CAGGGCUGGCUCUAUGCCCC | Chr2: 60495418-60495440 | 265 |
| CR00330 | 58 | − | GCUGAAAAGCGAUACAGGGC | Chr2: 60495432-60495454 | 266 |
| CR00331 | 58 | − | GAUGGCUGAAAAGCGAUACA | Chr2: 60495436-60495458 | 267 |
| CR00332 | 58 | − | AGAUGGCUGAAAAGCGAUAC | Chr2: 60495437-60495459 | 268 |
| CR00333 | 58 | − | GGGAGUUAUCUGUAGUGAGA | Chr2: 60495454-60495476 | 269 |
| CR00334 | 58 | − | AAGGCAGCUAGACAGGACUU | Chr2: 60495474-60495496 | 270 |
| CR00335 | 58 | − | GAAGGCAGCUAGACAGGACU | Chr2: 60495475-60495497 | 271 |
| CR00336 | 58 | − | GAUAAGGAAGGCAGCUAGAC | Chr2: 60495481-60495503 | 272 |
| CR00337 | 58 | + | CUAGCUGCCUUCCUUAUCAC | Chr2: 60495486-60495508 | 273 |
| CR00338 | 58 | − | UGGGUGCUAUUCCUGUGAUA | Chr2: 60495497-60495519 | 274 |
| CR00339 | 58 | + | UAUCACAGGAAUAGCACCCA | Chr2: 60495500-60495522 | 275 |
| CR00340 | 58 | − | CUGAGGUACUGAUGGACCUU | Chr2: 60495516-60495538 | 276 |
| CR00341 | 58 | − | UCUGAGGUACUGAUGGACCU | Chr2: 60495517-60495539 | 277 |
| CR001124 | 58 | − | UUAGGGUGGGGGCGUGGGUG | Chr2: 60495214-60495236 | 334 |
| CR001125 | 58 | − | UUUUAUCACAGGCUCCAGGA | Chr2: 60495215-60495237 | 335 |
| CR001126 | 58 | − | UUUAUCACAGGCUCCAGGAA | Chr2: 60495216-60495238 | 336 |
| CR001127 | 58 | − | CACAGGCUCCAGGAAGGGUU | Chr2: 60495220-60495242 | 337 |
| CR001128 | 58 | + | AUCAGAGGCCAAACCCUUCC | Chr2: 60495236-60495258 | 338 |
| CR001129 | 58 | − | CUCUGAUUAGGGUGGGGGCG | Chr2: 60495244-60495266 | 339 |
| CR001130 | 58 | − | GAUUAGGGUGGGGGCGUGGG | Chr2: 60495249-60495271 | 340 |
| CR001131 | 58 | − | AUUAGGGUGGGGGCGUGGGU | Chr2: 60495250-60495272 | 341 |

[0465] In some aspects of the invention, it is preferred that the gRNA molecule to the +58 Enhancer region of BCL11a comprise a targeting domain of a gRNA listed in FIG. 11. In an aspect, the gRNA molecule includes a targeting domain comprising, e.g., consisting of, SEQ ID NO: 341. In an aspect, the gRNA molecule includes a targeting domain comprising, e.g., consisting of, SEQ ID NO: 246. In an aspect, the gRNA molecule includes a targeting domain comprising, e.g., consisting of, SEQ ID NO: 248. In an aspect, the gRNA molecule includes a targeting domain comprising, e.g., consisting of, SEQ ID NO: 247. In an aspect, the gRNA molecule includes a targeting domain comprising, e.g., consisting of, SEQ ID NO: 245. In an aspect, the gRNA molecule includes a targeting domain comprising, e.g., consisting of, SEQ ID NO: 249. In an aspect, the gRNA molecule includes a targeting domain comprising, e.g., consisting of, SEQ ID NO: 244. In an aspect, the gRNA molecule includes a targeting domain comprising, e.g., consisting of, SEQ ID NO: 199. In an aspect, the gRNA molecule includes a targeting domain comprising, e.g., consisting of, SEQ ID NO: 251. In an aspect, the gRNA molecule includes a targeting domain comprising, e.g., consisting of, SEQ ID NO: 250. In an aspect, the gRNA molecule includes a targeting domain comprising, e.g., consisting of, SEQ ID NO: 334. In an aspect, the gRNA molecule includes a targeting domain comprising, e.g., consisting of, SEQ ID NO: 185. In an aspect, the gRNA molecule includes a targeting domain comprising, e.g., consisting of, SEQ ID NO: 186. In an aspect, the gRNA molecule includes a targeting domain comprising, e.g., consisting of, SEQ ID NO: 336. In an aspect, the gRNA molecule includes a targeting domain comprising, e.g., consisting of, SEQ ID NO: 337.

[0466] In some aspects of the invention, e.g., as indicated herein, it may be beneficial to include gRNA moleucles targeting more than one, e.g., two, target sites (e.g., a first gRNA molecule and a second gRNA molecule). In some embodiments, the two target sites are both located in the +58 BCL11a enhancer region. In such aspects, any combination of more than one, e.g., two, gRNA molecules (e.g., a first gRNA molecule and a second gRNA molecule) comprising targeting domains listed in Table 7 may be used. In an aspect, the first gRNA molecule and the second gRNA molecule include targeting domains comprising, e.g., consisting of, SEQ ID NO: 341 and SEQ ID NO: 244, respectively. In an aspect, the first gRNA molecule and the second gRNA molecule include targeting domains comprising, e.g., consisting of, SEQ ID NO: 341 and SEQ ID NO: 199, respectively. In an aspect, the first gRNA molecule and the second gRNA molecule include targeting domains comprising, e.g., consisting of, SEQ ID NO: 341 and SEQ ID NO: 251, respectively. In an aspect, the first gRNA molecule and the second gRNA molecule include targeting domains comprising, e.g., consisting of, SEQ ID NO: 341 and SEQ ID NO: 250, respectively. In an aspect, the first gRNA molecule and the second gRNA molecule include targeting domains comprising, e.g., consisting of, SEQ ID NO: 341 and SEQ ID NO: 334, respectively. In an aspect, the first gRNA molecule and the second gRNA molecule include targeting domains comprising, e.g., consisting of, SEQ ID NO: 341 and SEQ ID NO: 185, respectively. In an aspect, the first gRNA molecule and the second gRNA molecule include targeting domains comprising, e.g., consisting of, SEQ ID NO: 341 and SEQ ID NO: 186, respectively. In an aspect, the first gRNA molecule and the second gRNA molecule include targeting domains comprising, e.g., consisting of, SEQ ID NO: 341 and SEQ ID NO: 336, respectively. In an aspect, the first gRNA molecule and the second gRNA molecule include targeting domains comprising, e.g., consisting of, SEQ ID NO: 341 and SEQ ID NO: 337, respectively. In an aspect, the first gRNA molecule and the second gRNA molecule include targeting domains comprising, e.g., consisting of, SEQ ID NO: 341 and SEQ ID NO: 246, respectively. In an aspect, the first gRNA molecule and the second gRNA molecule include targeting domains comprising, e.g., consisting of, SEQ ID NO: 341 and SEQ ID NO: 248, respectively. In an aspect, the first gRNA molecule and the second gRNA molecule include targeting domains comprising, e.g., consisting of, SEQ ID NO: 341 and SEQ ID NO: 247, respectively. In an aspect, the first gRNA molecule and the second gRNA molecule include targeting domains comprising, e.g., consisting of, SEQ ID NO: 341 and SEQ ID NO: 245, respectively. In an aspect, the first gRNA molecule and the second gRNA molecule include targeting domains comprising, e.g., consisting of, SEQ ID NO: 341 and SEQ ID NO: 249, respectively. In an aspect, the first gRNA molecule and the second gRNA molecule include targeting domains comprising, e.g., consisting of, SEQ ID NO: 341 and SEQ ID NO: 244, respectively. In an aspect, the first gRNA molecule and the second gRNA molecule include targeting domains comprising, e.g., consisting of, SEQ ID NO: 341 and SEQ ID NO: 199, respectively. In an aspect, the first gRNA molecule and the second gRNA molecule include targeting domains comprising, e.g., consisting of, SEQ ID NO: 341 and SEQ ID NO: 251, respectively. In an aspect, the first gRNA molecule and the second gRNA molecule include targeting domains comprising, e.g., consisting of, SEQ ID NO: 341 and SEQ ID NO: 250, respectively. In an aspect, the first gRNA molecule and the second gRNA molecule include targeting domains comprising, e.g., consisting of, SEQ ID NO: 341 and SEQ ID NO: 334, respectively. In an aspect, the first gRNA molecule and the second gRNA molecule include targeting domains comprising, e.g., consisting of, SEQ ID NO: 341 and SEQ ID NO: 185, respectively. In an aspect, the first gRNA molecule and the second gRNA molecule include targeting domains comprising, e.g., consisting of, SEQ ID NO: 341 and SEQ ID NO: 186, respectively. In an aspect, the first gRNA molecule and the second gRNA molecule include targeting domains comprising, e.g., consisting of, SEQ ID NO: 341 and SEQ ID NO: 336, respectively. In an aspect, the first gRNA molecule and the second gRNA molecule include targeting domains comprising, e.g., consisting of, SEQ ID NO: 341 and SEQ ID NO: 337, respectively. In an aspect, the first gRNA molecule and the second gRNA molecule include targeting domains comprising, e.g., consisting of, SEQ ID NO: 246 and SEQ ID NO: 244, respectively. In an aspect, the first gRNA molecule and the second gRNA molecule include targeting domains comprising, e.g., consisting of, SEQ ID NO: 246 and SEQ ID NO: 199, respectively. In an aspect, the first gRNA molecule and the second gRNA molecule include targeting domains comprising, e.g., consisting of, SEQ ID NO: 246 and SEQ ID NO: 251, respectively. In an aspect, the first gRNA molecule and the second gRNA molecule include targeting domains comprising, e.g., consisting of, SEQ ID NO: 246 and SEQ ID NO: 250, respectively. In an aspect, the first gRNA molecule and the second gRNA molecule include targeting domains comprising, e.g., consisting of, SEQ ID NO: 246 and SEQ ID NO: 334, respectively. In an aspect, the first gRNA molecule and the second gRNA molecule include targeting domains comprising, e.g., consisting of, SEQ ID NO: 246 and SEQ ID NO: 185, respectively. In an aspect, the first gRNA molecule and the second gRNA molecule include targeting domains comprising, e.g., consisting of, SEQ ID NO: 246 and SEQ ID NO: 186, respectively. In an aspect, the first gRNA molecule and the second gRNA molecule include targeting domains comprising, e.g., consisting of, SEQ ID NO: 246 and SEQ ID NO: 336, respectively. In an aspect, the first gRNA molecule and the second gRNA molecule include targeting domains comprising, e.g., consisting of, SEQ ID NO: 246 and SEQ ID NO: 337, respectively. In an aspect, the first gRNA molecule and the second gRNA molecule include targeting domains comprising, e.g., consisting of, SEQ ID NO: 246 and SEQ ID NO: 248, respectively. In an aspect, the first gRNA molecule and the second gRNA molecule include targeting domains comprising, e.g., consisting of, SEQ ID NO: 246 and SEQ ID NO: 247, respectively. In an aspect, the first gRNA molecule and the second gRNA molecule include targeting domains comprising, e.g., consisting of, SEQ ID NO: 246 and SEQ ID NO: 245, respectively. In an aspect, the first gRNA molecule and the second gRNA molecule include targeting domains comprising, e.g., consisting of, SEQ ID NO: 246 and SEQ ID NO: 249, respectively. In an aspect, the first gRNA molecule and the second gRNA molecule include targeting domains comprising, e.g., consisting of, SEQ ID NO: 246 and SEQ ID NO: 244, respectively. In an aspect, the first gRNA molecule and the second gRNA molecule include targeting domains comprising, e.g., consisting of, SEQ ID NO: 246 and SEQ ID NO: 199, respectively. In an aspect, the first gRNA molecule and the second gRNA molecule include targeting domains comprising, e.g., consisting of, SEQ ID NO: 246 and SEQ ID NO: 251, respectively. In an aspect, the first gRNA molecule and the second gRNA molecule include targeting domains comprising, e.g., consisting of, SEQ ID NO: 246 and SEQ ID NO: 250, respectively. In an aspect, the first gRNA molecule and the second gRNA molecule include targeting domains comprising, e.g., consisting of, SEQ ID NO: 246 and SEQ ID NO: 334, respectively. In an aspect, the first gRNA molecule and the second gRNA molecule include targeting domains comprising, e.g., consisting of, SEQ ID NO: 246 and SEQ ID NO: 185, respectively. In an aspect, the first gRNA molecule and the second gRNA molecule include targeting domains comprising, e.g., consisting of, SEQ ID NO: 246 and SEQ ID NO: 186, respectively. In an aspect, the first gRNA molecule and the second gRNA molecule include targeting domains comprising, e.g., consisting of, SEQ ID NO: 246 and SEQ ID NO: 336, respectively. In an aspect, the first gRNA molecule and the second gRNA molecule include targeting domains comprising, e.g., consisting of, SEQ ID NO: 246 and SEQ ID NO: 337, respectively.

[0467] In an aspect, the first gRNA molecule and the second gRNA molecule include targeting domains comprising, e.g., consisting of, SEQ ID NO: 248 and SEQ ID NO: 244, respectively. In an aspect, the first gRNA molecule and the second gRNA molecule include targeting domains comprising, e.g., consisting of, SEQ ID NO: 248 and SEQ ID NO: 199, respectively. In an aspect, the first gRNA molecule and the second gRNA molecule include targeting domains comprising, e.g., consisting of, SEQ ID NO: 248 and SEQ ID NO: 251, respectively. In an aspect, the first gRNA molecule and the second gRNA molecule include targeting domains comprising, e.g., consisting of, SEQ ID NO: 248 and SEQ ID NO: 250, respectively. In an aspect, the first gRNA molecule and the second gRNA molecule include targeting domains comprising, e.g., consisting of, SEQ ID NO: 248 and SEQ ID NO: 334, respectively. In an aspect, the first gRNA molecule and the second gRNA molecule include targeting domains comprising, e.g., consisting of, SEQ ID NO: 248 and SEQ ID NO: 185, respectively. In an aspect, the first gRNA molecule and the second gRNA molecule include targeting domains comprising, e.g., consisting of, SEQ ID NO: 248 and SEQ ID NO: 186, respectively. In an aspect, the first gRNA molecule and the second gRNA molecule include targeting domains comprising, e.g., consisting of, SEQ ID NO: 248 and SEQ ID NO: 336, respectively. In an aspect, the first gRNA molecule and the second gRNA molecule include targeting domains comprising, e.g., consisting of, SEQ ID NO: 248 and SEQ ID NO: 337, respectively. In an aspect, the first gRNA molecule and the second gRNA molecule include targeting domains comprising, e.g., consisting of, SEQ ID NO: 248 and SEQ ID NO: 246, respectively. In an aspect, the first gRNA molecule and the second gRNA molecule include targeting domains comprising, e.g., consisting of, SEQ ID NO: 248 and SEQ ID NO: 247, respectively. In an aspect, the first gRNA molecule and the second gRNA molecule include targeting domains comprising, e.g., consisting of, SEQ ID NO: 248 and SEQ ID NO: 245, respectively. In an aspect, the first gRNA molecule and the second gRNA molecule include targeting domains comprising, e.g., consisting of, SEQ ID NO: 248 and SEQ ID NO: 249, respectively. In an aspect, the first gRNA molecule and the second gRNA molecule include targeting domains comprising, e.g., consisting of, SEQ ID NO: 248 and SEQ ID NO: 244, respectively. In an aspect, the first gRNA molecule and the second gRNA molecule include targeting domains comprising, e.g., consisting of, SEQ ID NO: 248 and SEQ ID NO: 199, respectively. In an aspect, the first gRNA molecule and the second gRNA molecule include targeting domains comprising, e.g., consisting of, SEQ ID NO: 248 and SEQ ID NO: 251, respectively. In an aspect, the first gRNA molecule and the second gRNA molecule include targeting domains comprising, e.g., consisting of, SEQ ID NO: 248 and SEQ ID NO: 250, respectively. In an aspect, the first gRNA molecule and the second gRNA molecule include targeting domains comprising, e.g., consisting of, SEQ ID NO: 248 and SEQ ID NO: 334, respectively. In an aspect, the first gRNA molecule and the second gRNA molecule include targeting domains comprising, e.g., consisting of, SEQ ID NO: 248 and SEQ ID NO: 185, respectively. In an aspect, the first gRNA molecule and the second gRNA molecule include targeting domains comprising, e.g., consisting of, SEQ ID NO: 248 and SEQ ID NO: 186, respectively. In an aspect, the first gRNA molecule and the second gRNA molecule include targeting domains comprising, e.g., consisting of, SEQ ID NO: 248 and SEQ ID NO: 336, respectively. In an aspect, the first gRNA molecule and the second gRNA molecule include targeting domains comprising, e.g., consisting of, SEQ ID NO: 248 and SEQ ID NO: 337, respectively. In an aspect, the first gRNA molecule and the second gRNA molecule include targeting domains comprising, e.g., consisting of, SEQ ID NO: 247 and SEQ ID NO: 244, respectively. In an aspect, the first gRNA molecule and the second gRNA molecule include targeting domains comprising, e.g., consisting of, SEQ ID NO: 247 and SEQ ID NO: 199, respectively. In an aspect, the first gRNA molecule and the second gRNA molecule include targeting domains comprising, e.g., consisting of, SEQ ID NO: 247 and SEQ ID NO: 251, respectively. In an aspect, the first gRNA molecule and the second gRNA molecule include targeting domains comprising, e.g., consisting of, SEQ ID NO: 247 and SEQ ID NO: 250, respectively. In an aspect, the first gRNA molecule and the second gRNA molecule include targeting domains comprising, e.g., consisting of, SEQ ID NO: 247 and SEQ ID NO: 334, respectively. In an aspect, the first gRNA molecule and the second gRNA molecule include targeting domains comprising, e.g., consisting of, SEQ ID NO: 247 and SEQ ID NO: 185, respectively. In an aspect, the first gRNA molecule and the second gRNA molecule include targeting domains comprising, e.g., consisting of, SEQ ID NO: 247 and SEQ ID NO: 186, respectively. In an aspect, the first gRNA molecule and the second gRNA molecule include targeting domains comprising, e.g., consisting of, SEQ ID NO: 247 and SEQ ID NO: 336, respectively. In an aspect, the first gRNA molecule and the second gRNA molecule include targeting domains comprising, e.g., consisting of, SEQ ID NO: 247 and SEQ ID NO: 337, respectively. In an aspect, the first gRNA molecule and the second gRNA molecule include targeting domains comprising, e.g., consisting of, SEQ ID NO: 247 and SEQ ID NO: 246, respectively. In an aspect, the first gRNA molecule and the second gRNA molecule include targeting domains comprising, e.g., consisting of, SEQ ID NO: 247 and SEQ ID NO: 248, respectively. In an aspect, the first gRNA molecule and the second gRNA molecule include targeting domains comprising, e.g., consisting of, SEQ ID NO: 247 and SEQ ID NO: 245, respectively. In an aspect, the first gRNA molecule and the second gRNA molecule include targeting domains comprising, e.g., consisting of, SEQ ID NO: 247 and SEQ ID NO: 249, respectively. In an aspect, the first gRNA molecule and the second gRNA molecule include targeting domains comprising, e.g., consisting of, SEQ ID NO: 247 and SEQ ID NO: 244, respectively. In an aspect, the first gRNA molecule and the second gRNA molecule include targeting domains comprising, e.g., consisting of, SEQ ID NO: 247 and SEQ ID NO: 199, respectively. In an aspect, the first gRNA molecule and the second gRNA molecule include targeting domains comprising, e.g., consisting of, SEQ ID NO: 247 and SEQ ID NO: 251, respectively. In an aspect, the first gRNA molecule and the second gRNA molecule include targeting domains comprising, e.g., consisting of, SEQ ID NO: 247 and SEQ ID NO: 250, respectively. In an aspect, the first gRNA molecule and the second gRNA molecule include targeting domains comprising, e.g., consisting of, SEQ ID NO: 247 and SEQ ID NO: 334, respectively. In an aspect, the first gRNA molecule and the second gRNA molecule include targeting domains comprising, e.g., consisting of, SEQ ID NO: 247 and SEQ ID NO: 185, respectively. In an aspect, the first gRNA molecule and the second gRNA molecule include targeting domains comprising, e.g., consisting of, SEQ ID NO: 247 and SEQ ID NO: 186, respectively. In an aspect, the first gRNA molecule and the second gRNA molecule include targeting domains comprising, e.g., consisting of, SEQ ID NO: 247 and SEQ ID NO: 336, respectively. In an aspect, the first gRNA molecule and the second gRNA molecule include targeting domains comprising, e.g., consisting of, SEQ ID NO: 247 and SEQ ID NO: 337, respectively. In an aspect, the first gRNA molecule and the second gRNA molecule include targeting domains comprising, e.g., consisting of, SEQ ID NO: 245 and SEQ ID NO: 244, respectively. In an aspect, the first gRNA molecule and the second gRNA molecule include targeting domains comprising, e.g., consisting of, SEQ ID NO: 245 and SEQ ID NO: 199, respectively. In an aspect, the first gRNA molecule and the second gRNA molecule include targeting domains comprising, e.g., consisting of, SEQ ID NO: 245 and SEQ ID NO: 251, respectively. In an aspect, the first gRNA molecule and the second gRNA molecule include targeting domains comprising, e.g., consisting of, SEQ ID NO: 245 and SEQ ID NO: 250, respectively. In an aspect, the first gRNA molecule and the second gRNA molecule include targeting domains comprising, e.g., consisting of, SEQ ID NO: 245 and SEQ ID NO: 334, respectively. In an aspect, the first gRNA molecule and the second gRNA molecule include targeting domains comprising, e.g., consisting of, SEQ ID NO: 245 and SEQ ID NO: 185, respectively. In an aspect, the first gRNA molecule and the second gRNA molecule include targeting domains comprising, e.g., consisting of, SEQ ID NO: 245 and SEQ ID NO: 186, respectively. In an aspect, the first gRNA molecule and the second gRNA molecule include targeting domains comprising, e.g., consisting of, SEQ ID NO: 245 and SEQ ID NO: 336, respectively. In an aspect, the first gRNA molecule and the second gRNA molecule include targeting domains comprising, e.g., consisting of, SEQ ID NO: 245 and SEQ ID NO: 337, respectively. In an aspect, the first gRNA molecule and the second gRNA molecule include targeting domains comprising, e.g., consisting of, SEQ ID NO: 245 and SEQ ID NO: 246, respectively. In an aspect, the first gRNA molecule and the second gRNA molecule include targeting domains comprising, e.g., consisting of, SEQ ID NO: 245 and SEQ ID NO: 248, respectively. In an aspect, the first gRNA molecule and the second gRNA molecule include targeting domains comprising, e.g., consisting of, SEQ ID NO: 245 and SEQ ID NO: 247, respectively. In an aspect, the first gRNA molecule and the second gRNA molecule include targeting domains comprising, e.g., consisting of, SEQ ID NO: 245 and SEQ ID NO: 249, respectively. In an aspect, the first gRNA molecule and the second gRNA molecule include targeting domains comprising, e.g., consisting of, SEQ ID NO: 245 and SEQ ID NO: 244, respectively. In an aspect, the first gRNA molecule and the second gRNA molecule include targeting domains comprising, e.g., consisting of, SEQ ID NO: 245 and SEQ ID NO: 199, respectively. In an aspect, the first gRNA molecule and the second gRNA molecule include targeting domains comprising, e.g., consisting of, SEQ ID NO: 245 and SEQ ID NO: 251, respectively. In an aspect, the first gRNA molecule and the second gRNA molecule include targeting domains comprising, e.g., consisting of, SEQ ID NO: 245 and SEQ ID NO: 250, respectively. In an aspect, the first gRNA molecule and the second gRNA molecule include targeting domains comprising, e.g., consisting of, SEQ ID NO: 245 and SEQ ID NO: 334, respectively. In an aspect, the first gRNA molecule and the second gRNA molecule include targeting domains comprising, e.g., consisting of, SEQ ID NO: 245 and SEQ ID NO: 185, respectively. In an aspect, the first gRNA molecule and the second gRNA molecule include targeting domains comprising, e.g., consisting of, SEQ ID NO: 245 and SEQ ID NO: 186, respectively. In an aspect, the first gRNA molecule and the second gRNA molecule include targeting domains comprising, e.g., consisting of, SEQ ID NO: 245 and SEQ ID NO: 336, respectively. In an aspect, the first gRNA molecule and the second gRNA molecule include targeting domains comprising, e.g., consisting of, SEQ ID NO: 245 and SEQ ID NO: 337, respectively. In an aspect, the first gRNA molecule and the second gRNA molecule include targeting domains comprising, e.g., consisting of, SEQ ID NO: 249 and SEQ ID NO: 244, respectively. In an aspect, the first gRNA molecule and the second gRNA molecule include targeting domains comprising, e.g., consisting of, SEQ ID NO: 249 and SEQ ID NO: 199, respectively. In an aspect, the first gRNA molecule and the second gRNA molecule include targeting domains comprising, e.g., consisting of, SEQ ID NO: 249 and SEQ ID NO: 251, respectively. In an aspect, the first gRNA molecule and the second gRNA molecule include targeting domains comprising, e.g., consisting of, SEQ ID NO: 249 and SEQ ID NO: 250, respectively. In an aspect, the first gRNA molecule and the second gRNA molecule include targeting domains comprising, e.g., consisting of, SEQ ID NO: 249 and SEQ ID NO: 334, respectively. In an aspect, the first gRNA molecule and the second gRNA molecule include targeting domains comprising, e.g., consisting of, SEQ ID NO: 249 and SEQ ID NO: 185, respectively. In an aspect, the first gRNA molecule and the second gRNA molecule include targeting domains comprising, e.g., consisting of, SEQ ID NO: 249 and SEQ ID NO: 186, respectively. In an aspect, the first gRNA molecule and the second gRNA molecule include targeting domains comprising, e.g., consisting of, SEQ ID NO: 249 and SEQ ID NO: 336, respectively. In an aspect, the first gRNA molecule and the second gRNA molecule include targeting domains comprising, e.g., consisting of, SEQ ID NO: 249 and SEQ ID NO: 337, respectively. In an aspect, the first gRNA molecule and the second gRNA molecule include targeting domains comprising, e.g., consisting of, SEQ ID NO: 249 and SEQ ID NO: 246, respectively. In an aspect, the first gRNA molecule and the second gRNA molecule include targeting domains comprising, e.g., consisting of, SEQ ID NO: 249 and SEQ ID NO: 248, respectively. In an aspect, the first gRNA molecule and the second gRNA molecule include targeting domains comprising, e.g., consisting of, SEQ ID NO: 249 and SEQ ID NO: 247, respectively. In an aspect, the first gRNA molecule and the second gRNA molecule include targeting domains comprising, e.g., consisting of, SEQ ID NO: 249 and SEQ ID NO: 245, respectively. In an aspect, the first gRNA molecule and the second gRNA molecule include targeting domains comprising, e.g., consisting of, SEQ ID NO: 249 and SEQ ID NO: 244, respectively. In an aspect, the first gRNA molecule and the second gRNA molecule include targeting domains comprising, e.g., consisting of, SEQ ID NO: 249 and SEQ ID NO: 199, respectively. In an aspect, the first gRNA molecule and the second gRNA molecule include targeting domains comprising, e.g., consisting of, SEQ ID NO: 249 and SEQ ID NO: 251, respectively. In an aspect, the first gRNA molecule and the second gRNA molecule include targeting domains comprising, e.g., consisting of, SEQ ID NO: 249 and SEQ ID NO: 250, respectively. In an aspect, the first gRNA molecule and the second gRNA molecule include targeting domains comprising, e.g., consisting of, SEQ ID NO: 249 and SEQ ID NO: 334, respectively. In an aspect, the first gRNA molecule and the second gRNA molecule include targeting domains comprising, e.g., consisting of, SEQ ID NO: 249 and SEQ ID NO: 185, respectively. In an aspect, the first gRNA molecule and the second gRNA molecule include targeting domains comprising, e.g., consisting of, SEQ ID NO: 249 and SEQ ID NO: 186, respectively. In an aspect, the first gRNA molecule and the second gRNA molecule include targeting domains comprising, e.g., consisting of, SEQ ID NO: 249 and SEQ ID NO: 336, respectively. In an aspect, the first gRNA molecule and the second gRNA molecule include targeting domains comprising, e.g., consisting of, SEQ ID NO: 249 and SEQ ID NO: 337, respectively. In an aspect, the first gRNA molecule and the second gRNA molecule include targeting domains comprising, e.g., consisting of, SEQ ID NO: 244 and SEQ ID NO: 199, respectively. In an aspect, the first gRNA molecule and the second gRNA molecule include targeting domains comprising, e.g., consisting of, SEQ ID NO: 244 and SEQ ID NO: 251, respectively. In an aspect, the first gRNA molecule and the second gRNA molecule include targeting domains comprising, e.g., consisting of, SEQ ID NO: 244 and SEQ ID NO: 250, respectively. In an aspect, the first gRNA molecule and the second gRNA molecule include targeting domains comprising, e.g., consisting of, SEQ ID NO: 244 and SEQ ID NO: 334, respectively. In an aspect, the first gRNA molecule and the second gRNA molecule include targeting domains comprising, e.g., consisting of, SEQ ID NO: 244 and SEQ ID NO: 185, respectively. In an aspect, the first gRNA molecule and the second gRNA molecule include targeting domains comprising, e.g., consisting of, SEQ ID NO: 244 and SEQ ID NO: 186, respectively. In an aspect, the first gRNA molecule and the second gRNA molecule include targeting domains comprising, e.g., consisting of, SEQ ID NO: 244 and SEQ ID NO: 336, respectively. In an aspect, the first gRNA molecule and the second gRNA molecule include targeting domains comprising, e.g., consisting of, SEQ ID NO: 244 and SEQ ID NO: 337, respectively. In an aspect, the first gRNA molecule and the second gRNA molecule include targeting domains comprising, e.g., consisting of, SEQ ID NO: 244 and SEQ ID NO: 246, respectively. In an aspect, the first gRNA molecule and the second gRNA molecule include targeting domains comprising, e.g., consisting of, SEQ ID NO: 244 and SEQ ID NO: 248, respectively. In an aspect, the first gRNA molecule and the second gRNA molecule include targeting domains comprising, e.g., consisting of, SEQ ID NO: 244 and SEQ ID NO: 247, respectively. In an aspect, the first gRNA molecule and the second gRNA molecule include targeting domains comprising, e.g., consisting of, SEQ ID NO: 244 and SEQ ID NO: 245, respectively. In an aspect, the first gRNA molecule and the second gRNA molecule include targeting domains comprising, e.g., consisting of, SEQ ID NO: 244 and SEQ ID NO: 249, respectively. In an aspect, the first gRNA molecule and the second gRNA molecule include targeting domains comprising, e.g., consisting of, SEQ ID NO: 244 and SEQ ID NO: 199, respectively. In an aspect, the first gRNA molecule and the second gRNA molecule include targeting domains comprising, e.g., consisting of, SEQ ID NO: 244 and SEQ ID NO: 251, respectively. In an aspect, the first gRNA molecule and the second gRNA molecule include targeting domains comprising, e.g., consisting of, SEQ ID NO: 244 and SEQ ID NO: 250, respectively. In an aspect, the first gRNA molecule and the second gRNA molecule include targeting domains comprising, e.g., consisting of, SEQ ID NO: 244 and SEQ ID NO: 334, respectively. In an aspect, the first gRNA molecule and the second gRNA molecule include targeting domains comprising, e.g., consisting of, SEQ ID NO: 244 and SEQ ID NO: 185, respectively. In an aspect, the first gRNA molecule and the second gRNA molecule include targeting domains comprising, e.g., consisting of, SEQ ID NO: 244 and SEQ ID NO: 186, respectively. In an aspect, the first gRNA molecule and the second gRNA molecule include targeting domains comprising, e.g., consisting of, SEQ ID NO: 244 and SEQ ID NO: 336, respectively. In an aspect, the first gRNA molecule and the second gRNA molecule include targeting domains comprising, e.g., consisting of, SEQ ID NO: 244 and SEQ ID NO: 337, respectively. In an aspect, the first gRNA molecule and the second gRNA molecule include targeting domains comprising, e.g., consisting of, SEQ ID NO: 199 and SEQ ID NO: 244, respectively. In an aspect, the first gRNA molecule and the second gRNA molecule include targeting domains comprising, e.g., consisting of, SEQ ID NO: 199 and SEQ ID NO: 251, respectively. In an aspect, the first gRNA molecule and the second gRNA molecule include targeting domains comprising, e.g., consisting of, SEQ ID NO: 199 and SEQ ID NO: 250, respectively. In an aspect, the first gRNA molecule and the second gRNA molecule include targeting domains comprising, e.g., consisting of, SEQ ID NO: 199 and SEQ ID NO: 334, respectively. In an aspect, the first gRNA molecule and the second gRNA molecule include targeting domains comprising, e.g., consisting of, SEQ ID NO: 199 and SEQ ID NO: 185, respectively. In an aspect, the first gRNA molecule and the second gRNA molecule include targeting domains comprising, e.g., consisting of, SEQ ID NO: 199 and SEQ ID NO: 186, respectively. In an aspect, the first gRNA molecule and the second gRNA molecule include targeting domains comprising, e.g., consisting of, SEQ ID NO: 199 and SEQ ID NO: 336, respectively. In an aspect, the first gRNA molecule and the second gRNA molecule include targeting domains comprising, e.g., consisting of, SEQ ID NO: 199 and SEQ ID NO: 337, respectively. In an aspect, the first gRNA molecule and the second gRNA molecule include targeting domains comprising, e.g., consisting of, SEQ ID NO: 199 and SEQ ID NO: 246, respectively. In an aspect, the first gRNA molecule and the second gRNA molecule include targeting domains comprising, e.g., consisting of, SEQ ID NO: 199 and SEQ ID NO: 248, respectively. In an aspect, the first gRNA molecule and the second gRNA molecule include targeting domains comprising, e.g., consisting of, SEQ ID NO: 199 and SEQ ID NO: 247, respectively. In an aspect, the first gRNA molecule and the second gRNA molecule include targeting domains comprising, e.g., consisting of, SEQ ID NO: 199 and SEQ ID NO: 245, respectively. In an aspect, the first gRNA molecule and the second gRNA molecule include targeting domains comprising, e.g., consisting of, SEQ ID NO: 199 and SEQ ID NO: 249, respectively. In an aspect, the first gRNA molecule and the second gRNA molecule include targeting domains comprising, e.g., consisting of, SEQ ID NO: 199 and SEQ ID NO: 244, respectively. In an aspect, the first gRNA molecule and the second gRNA molecule include targeting domains comprising, e.g., consisting of, SEQ ID NO: 199 and SEQ ID NO: 251, respectively. In an aspect, the first gRNA molecule and the second gRNA molecule include targeting domains comprising, e.g., consisting of, SEQ ID NO: 199 and SEQ ID NO: 250, respectively. In an aspect, the first gRNA molecule and the second gRNA molecule include targeting domains comprising, e.g., consisting of, SEQ ID NO: 199 and SEQ ID NO: 334, respectively. In an aspect, the first gRNA molecule and the second gRNA molecule include targeting domains comprising, e.g., consisting of, SEQ ID NO: 199 and SEQ ID NO: 185, respectively. In an aspect, the first gRNA molecule and the second gRNA molecule include targeting domains comprising, e.g., consisting of, SEQ ID NO: 199 and SEQ ID NO: 186, respectively. In an aspect, the first gRNA molecule and the second gRNA molecule include targeting domains comprising, e.g., consisting of, SEQ ID NO: 199 and SEQ ID NO: 336, respectively. In an aspect, the first gRNA molecule and the second gRNA molecule include targeting domains comprising, e.g., consisting of, SEQ ID NO: 199 and SEQ ID NO: 337, respectively.

[0468] In an aspect, the first gRNA molecule and the second gRNA molecule include targeting domains comprising, e.g., consisting of, SEQ ID NO: 251 and SEQ ID NO: 244, respectively. In an aspect, the first gRNA molecule and the second gRNA molecule include targeting domains comprising, e.g., consisting of, SEQ ID NO: 251 and SEQ ID NO: 199, respectively. In an aspect, the first gRNA molecule and the second gRNA molecule include targeting domains comprising, e.g., consisting of, SEQ ID NO: 251 and SEQ ID NO: 250, respectively. In an aspect, the first gRNA molecule and the second gRNA molecule include targeting domains comprising, e.g., consisting of, SEQ ID NO: 251 and SEQ ID NO: 334, respectively. In an aspect, the first gRNA molecule and the second gRNA molecule include targeting domains comprising, e.g., consisting of, SEQ ID NO: 251 and SEQ ID NO: 185, respectively. In an aspect, the first gRNA molecule and the second gRNA molecule include targeting domains comprising, e.g., consisting of, SEQ ID NO: 251 and SEQ ID NO: 186, respectively. In an aspect, the first gRNA molecule and the second gRNA molecule include targeting domains comprising, e.g., consisting of, SEQ ID NO: 251 and SEQ ID NO: 336, respectively. In an aspect, the first gRNA molecule and the second gRNA molecule include targeting domains comprising, e.g., consisting of, SEQ ID NO: 251 and SEQ ID NO: 337, respectively. In an aspect, the first gRNA molecule and the second gRNA molecule include targeting domains comprising, e.g., consisting of, SEQ ID NO: 251 and SEQ ID NO: 246, respectively. In an aspect, the first gRNA molecule and the second gRNA molecule include targeting domains comprising, e.g., consisting of, SEQ ID NO: 251 and SEQ ID NO: 248, respectively. In an aspect, the first gRNA molecule and the second gRNA molecule include targeting domains comprising, e.g., consisting of, SEQ ID NO: 251 and SEQ ID NO: 247, respectively. In an aspect, the first gRNA molecule and the second gRNA molecule include targeting domains comprising, e.g., consisting of, SEQ ID NO: 251 and SEQ ID NO: 245, respectively. In an aspect, the first gRNA molecule and the second gRNA molecule include targeting domains comprising, e.g., consisting of, SEQ ID NO: 251 and SEQ ID NO: 249, respectively. In an aspect, the first gRNA molecule and the second gRNA molecule include targeting domains comprising, e.g., consisting of, SEQ ID NO: 251 and SEQ ID NO: 244, respectively. In an aspect, the first gRNA molecule and the second gRNA molecule include targeting domains comprising, e.g., consisting of, SEQ ID NO: 251 and SEQ ID NO: 199, respectively. In an aspect, the first gRNA molecule and the second gRNA molecule include targeting domains comprising, e.g., consisting of, SEQ ID NO: 251 and SEQ ID NO: 250, respectively. In an aspect, the first gRNA molecule and the second gRNA molecule include targeting domains comprising, e.g., consisting of, SEQ ID NO: 251 and SEQ ID NO: 334, respectively. In an aspect, the first gRNA molecule and the second gRNA molecule include targeting domains comprising, e.g., consisting of, SEQ ID NO: 251 and SEQ ID NO: 185, respectively. In an aspect, the first gRNA molecule and the second gRNA molecule include targeting domains comprising, e.g., consisting of, SEQ ID NO: 251 and SEQ ID NO: 186, respectively. In an aspect, the first gRNA molecule and the second gRNA molecule include targeting domains comprising, e.g., consisting of, SEQ ID NO: 251 and SEQ ID NO: 336, respectively. In an aspect, the first gRNA molecule and the second gRNA molecule include targeting domains comprising, e.g., consisting of, SEQ ID NO: 251 and SEQ ID NO: 337, respectively. In an aspect, the first gRNA molecule and the second gRNA molecule include targeting domains comprising, e.g., consisting of, SEQ ID NO: 250 and SEQ ID NO: 244, respectively. In an aspect, the first gRNA molecule and the second gRNA molecule include targeting domains comprising, e.g., consisting of, SEQ ID NO: 250 and SEQ ID NO: 199, respectively. In an aspect, the first gRNA molecule and the second gRNA molecule include targeting domains comprising, e.g., consisting of, SEQ ID NO: 250 and SEQ ID NO: 251, respectively. In an aspect, the first gRNA molecule and the second gRNA molecule include targeting domains comprising, e.g., consisting of, SEQ ID NO: 250 and SEQ ID NO: 334, respectively. In an aspect, the first gRNA molecule and the second gRNA molecule include targeting domains comprising, e.g., consisting of, SEQ ID NO: 250 and SEQ ID NO: 185, respectively. In an aspect, the first gRNA molecule and the second gRNA molecule include targeting domains comprising, e.g., consisting of, SEQ ID NO: 250 and SEQ ID NO: 186, respectively. In an aspect, the first gRNA molecule and the second gRNA molecule include targeting domains comprising, e.g., consisting of, SEQ ID NO: 250 and SEQ ID NO: 336, respectively. In an aspect, the first gRNA molecule and the second gRNA molecule include targeting domains comprising, e.g., consisting of, SEQ ID NO: 250 and SEQ ID NO: 337, respectively. In an aspect, the first gRNA molecule and the second gRNA molecule include targeting domains comprising, e.g., consisting of, SEQ ID NO: 250 and SEQ ID NO: 246, respectively. In an aspect, the first gRNA molecule and the second gRNA molecule include targeting domains comprising, e.g., consisting of, SEQ ID NO: 250 and SEQ ID NO: 248, respectively. In an aspect, the first gRNA molecule and the second gRNA molecule include targeting domains comprising, e.g., consisting of, SEQ ID NO: 250 and SEQ ID NO: 247, respectively. In an aspect, the first gRNA molecule and the second gRNA molecule include targeting domains comprising, e.g., consisting of, SEQ ID NO: 250 and SEQ ID NO: 245, respectively. In an aspect, the first gRNA molecule and the second gRNA molecule include targeting domains comprising, e.g., consisting of, SEQ ID NO: 250 and SEQ ID NO: 249, respectively. In an aspect, the first gRNA molecule and the second gRNA molecule include targeting domains comprising, e.g., consisting of, SEQ ID NO: 250 and SEQ ID NO: 244, respectively. In an aspect, the first gRNA molecule and the second gRNA molecule include targeting domains comprising, e.g., consisting of, SEQ ID NO: 250 and SEQ ID NO: 199, respectively. In an aspect, the first gRNA molecule and the second gRNA molecule include targeting domains comprising, e.g., consisting of, SEQ ID NO: 250 and SEQ ID NO: 251, respectively. In an aspect, the first gRNA molecule and the second gRNA molecule include targeting domains comprising, e.g., consisting of, SEQ ID NO: 250 and SEQ ID NO: 334, respectively. In an aspect, the first gRNA molecule and the second gRNA molecule include targeting domains comprising, e.g., consisting of, SEQ ID NO: 250 and SEQ ID NO: 185, respectively. In an aspect, the first gRNA molecule and the second gRNA molecule include targeting domains comprising, e.g., consisting of, SEQ ID NO: 250 and SEQ ID NO: 186, respectively. In an aspect, the first gRNA molecule and the second gRNA molecule include targeting domains comprising, e.g., consisting of, SEQ ID NO: 250 and SEQ ID NO: 336, respectively. In an aspect, the first gRNA molecule and the second gRNA molecule include targeting domains comprising, e.g., consisting of, SEQ ID NO: 250 and SEQ ID NO: 337, respectively. In an aspect, the first gRNA molecule and the second gRNA molecule include targeting domains comprising, e.g., consisting of, SEQ ID NO: 334 and SEQ ID NO: 244, respectively. In an aspect, the first gRNA molecule and the second gRNA molecule include targeting domains comprising, e.g., consisting of, SEQ ID NO: 334 and SEQ ID NO: 199, respectively. In an aspect, the first gRNA molecule and the second gRNA molecule include targeting domains comprising, e.g., consisting of, SEQ ID NO: 334 and SEQ ID NO: 251, respectively. In an aspect, the first gRNA molecule and the second gRNA molecule include targeting domains comprising, e.g., consisting of, SEQ ID NO: 334 and SEQ ID NO: 250, respectively. In an aspect, the first gRNA molecule and the second gRNA molecule include targeting domains comprising, e.g., consisting of, SEQ ID NO: 334 and SEQ ID NO: 185, respectively. In an aspect, the first gRNA molecule and the second gRNA molecule include targeting domains comprising, e.g., consisting of, SEQ ID NO: 334 and SEQ ID NO: 186, respectively. In an aspect, the first gRNA molecule and the second gRNA molecule include targeting domains comprising, e.g., consisting of, SEQ ID NO: 334 and SEQ ID NO: 336, respectively. In an aspect, the first gRNA molecule and the second gRNA molecule include targeting domains comprising, e.g., consisting of, SEQ ID NO: 334 and SEQ ID NO: 337, respectively. In an aspect, the first gRNA molecule and the second gRNA molecule include targeting domains comprising, e.g., consisting of, SEQ ID NO: 334 and SEQ ID NO: 246, respectively. In an aspect, the first gRNA molecule and the second gRNA molecule include targeting domains comprising, e.g., consisting of, SEQ ID NO: 334 and SEQ ID NO: 248, respectively. In an aspect, the first gRNA molecule and the second gRNA molecule include targeting domains comprising, e.g., consisting of, SEQ ID NO: 334 and SEQ ID NO: 247, respectively. In an aspect, the first gRNA molecule and the second gRNA molecule include targeting domains comprising, e.g., consisting of, SEQ ID NO: 334 and SEQ ID NO: 245, respectively. In an aspect, the first gRNA molecule and the second gRNA molecule include targeting domains comprising, e.g., consisting of, SEQ ID NO: 334 and SEQ ID NO: 249, respectively. In an aspect, the first gRNA molecule and the second gRNA molecule include targeting domains comprising, e.g., consisting of, SEQ ID NO: 334 and SEQ ID NO: 244, respectively. In an aspect, the first gRNA molecule and the second gRNA molecule include targeting domains comprising, e.g., consisting of, SEQ ID NO: 334 and SEQ ID NO: 199, respectively. In an aspect, the first gRNA molecule and the second gRNA molecule include targeting domains comprising, e.g., consisting of, SEQ ID NO: 334 and SEQ ID NO: 251, respectively. In an aspect, the first gRNA molecule and the second gRNA molecule include targeting domains comprising, e.g., consisting of, SEQ ID NO: 334 and SEQ ID NO: 250, respectively. In an aspect, the first gRNA molecule and the second gRNA molecule include targeting domains comprising, e.g., consisting of, SEQ ID NO: 334 and SEQ ID NO: 185, respectively. In an aspect, the first gRNA molecule and the second gRNA molecule include targeting domains comprising, e.g., consisting of, SEQ ID NO: 334 and SEQ ID NO: 186, respectively. In an aspect, the first gRNA molecule and the second gRNA molecule include targeting domains comprising, e.g., consisting of, SEQ ID NO: 334 and SEQ ID NO: 336, respectively. In an aspect, the first gRNA molecule and the second gRNA molecule include targeting domains comprising, e.g., consisting of, SEQ ID NO: 334 and SEQ ID NO: 337, respectively. In an aspect, the first gRNA molecule and the second gRNA molecule include targeting domains comprising, e.g., consisting of, SEQ ID NO: 185 and SEQ ID NO: 244, respectively. In an aspect, the first gRNA molecule and the second gRNA molecule include targeting domains comprising, e.g., consisting of, SEQ ID NO: 185 and SEQ ID NO: 199, respectively. In an aspect, the first gRNA molecule and the second gRNA molecule include targeting domains comprising, e.g., consisting of, SEQ ID NO: 185 and SEQ ID NO: 251, respectively. In an aspect, the first gRNA molecule and the second gRNA molecule include targeting domains comprising, e.g., consisting of, SEQ ID NO: 185 and SEQ ID NO: 250, respectively. In an aspect, the first gRNA molecule and the second gRNA molecule include targeting domains comprising, e.g., consisting of, SEQ ID NO: 185 and SEQ ID NO: 334, respectively. In an aspect, the first gRNA molecule and the second gRNA molecule include targeting domains comprising, e.g., consisting of, SEQ ID NO: 185 and SEQ ID NO: 186, respectively. In an aspect, the first gRNA molecule and the second gRNA molecule include targeting domains comprising, e.g., consisting of, SEQ ID NO: 185 and SEQ ID NO: 336, respectively. In an aspect, the first gRNA molecule and the second gRNA molecule include targeting domains comprising, e.g., consisting of, SEQ ID NO: 185 and SEQ ID NO: 337, respectively. In an aspect, the first gRNA molecule and the second gRNA molecule include targeting domains comprising, e.g., consisting of, SEQ ID NO: 185 and SEQ ID NO: 246, respectively. In an aspect, the first gRNA molecule and the second gRNA molecule include targeting domains comprising, e.g., consisting of, SEQ ID NO: 185 and SEQ ID NO: 248, respectively. In an aspect, the first gRNA molecule and the second gRNA molecule include targeting domains comprising, e.g., consisting of, SEQ ID NO: 185 and SEQ ID NO: 247, respectively. In an aspect, the first gRNA molecule and the second gRNA molecule include targeting domains comprising, e.g., consisting of, SEQ ID NO: 185 and SEQ ID NO: 245, respectively. In an aspect, the first gRNA molecule and the second gRNA molecule include targeting domains comprising, e.g., consisting of, SEQ ID NO: 185 and SEQ ID NO: 249, respectively. In an aspect, the first gRNA molecule and the second gRNA molecule include targeting domains comprising, e.g., consisting of, SEQ ID NO: 185 and SEQ ID NO: 244, respectively. In an aspect, the first gRNA molecule and the second gRNA molecule include targeting domains comprising, e.g., consisting of, SEQ ID NO: 185 and SEQ ID NO: 199, respectively. In an aspect, the first gRNA molecule and the second gRNA molecule include targeting domains comprising, e.g., consisting of, SEQ ID NO: 185 and SEQ ID NO: 251, respectively. In an aspect, the first gRNA molecule and the second gRNA molecule include targeting domains comprising, e.g., consisting of, SEQ ID NO: 185 and SEQ ID NO: 250, respectively. In an aspect, the first gRNA molecule and the second gRNA molecule include targeting domains comprising, e.g., consisting of, SEQ ID NO: 185 and SEQ ID NO: 334, respectively. In an aspect, the first gRNA molecule and the second gRNA molecule include targeting domains comprising, e.g., consisting of, SEQ ID NO: 185 and SEQ ID NO: 186, respectively. In an aspect, the first gRNA molecule and the second gRNA molecule include targeting domains comprising, e.g., consisting of, SEQ ID NO: 185 and SEQ ID NO: 336, respectively. In an aspect, the first gRNA molecule and the second gRNA molecule include targeting domains comprising, e.g., consisting of, SEQ ID NO: 185 and SEQ ID NO: 337, respectively. In an aspect, the first gRNA molecule and the second gRNA molecule include targeting domains comprising, e.g., consisting of, SEQ ID NO: 186 and SEQ ID NO: 244, respectively. In an aspect, the first gRNA molecule and the second gRNA molecule include targeting domains comprising, e.g., consisting of, SEQ ID NO: 186 and SEQ ID NO: 199, respectively. In an aspect, the first gRNA molecule and the second gRNA molecule include targeting domains comprising, e.g., consisting of, SEQ ID NO: 186 and SEQ ID NO: 251, respectively. In an aspect, the first gRNA molecule and the second gRNA molecule include targeting domains comprising, e.g., consisting of, SEQ ID NO: 186 and SEQ ID NO: 250, respectively. In an aspect, the first gRNA molecule and the second gRNA molecule include targeting domains comprising, e.g., consisting of, SEQ ID NO: 186 and SEQ ID NO: 334, respectively. In an aspect, the first gRNA molecule and the second gRNA molecule include targeting domains comprising, e.g., consisting of, SEQ ID NO: 186 and SEQ ID NO: 185, respectively. In an aspect, the first gRNA molecule and the second gRNA molecule include targeting domains comprising, e.g., consisting of, SEQ ID NO: 186 and SEQ ID NO: 336, respectively. In an aspect, the first gRNA molecule and the second gRNA molecule include targeting domains comprising, e.g., consisting of, SEQ ID NO: 186 and SEQ ID NO: 337, respectively. In an aspect, the first gRNA molecule and the second gRNA molecule include targeting domains comprising, e.g., consisting of, SEQ ID NO: 186 and SEQ ID NO: 246, respectively. In an aspect, the first gRNA molecule and the second gRNA molecule include targeting domains comprising, e.g., consisting of, SEQ ID NO: 186 and SEQ ID NO: 248, respectively. In an aspect, the first gRNA molecule and the second gRNA molecule include targeting domains comprising, e.g., consisting of, SEQ ID NO: 186 and SEQ ID NO: 247, respectively. In an aspect, the first gRNA molecule and the second gRNA molecule include targeting domains comprising, e.g., consisting of, SEQ ID NO: 186 and SEQ ID NO: 245, respectively. In an aspect, the first gRNA molecule and the second gRNA molecule include targeting domains comprising, e.g., consisting of, SEQ ID NO: 186 and SEQ ID NO: 249, respectively. In an aspect, the first gRNA molecule and the second gRNA molecule include targeting domains comprising, e.g., consisting of, SEQ ID NO: 186 and SEQ ID NO: 244, respectively. In an aspect, the first gRNA molecule and the second gRNA molecule include targeting domains comprising, e.g., consisting of, SEQ ID NO: 186 and SEQ ID NO: 199, respectively. In an aspect, the first gRNA molecule and the second gRNA molecule include targeting domains comprising, e.g., consisting of, SEQ ID NO: 186 and SEQ ID NO: 251, respectively. In an aspect, the first gRNA molecule and the second gRNA molecule include targeting domains comprising, e.g., consisting of, SEQ ID NO: 186 and SEQ ID NO: 250, respectively. In an aspect, the first gRNA molecule and the second gRNA molecule include targeting domains comprising, e.g., consisting of, SEQ ID NO: 186 and SEQ ID NO: 334, respectively. In an aspect, the first gRNA molecule and the second gRNA molecule include targeting domains comprising, e.g., consisting of, SEQ ID NO: 186 and SEQ ID NO: 185, respectively. In an aspect, the first gRNA molecule and the second gRNA molecule include targeting domains comprising, e.g., consisting of, SEQ ID NO: 186 and SEQ ID NO: 336, respectively. In an aspect, the first gRNA molecule and the second gRNA molecule include targeting domains comprising, e.g., consisting of, SEQ ID NO: 186 and SEQ ID NO: 337, respectively.

[0469] In an aspect, the first gRNA molecule and the second gRNA molecule include targeting domains comprising, e.g., consisting of, SEQ ID NO: 336 and SEQ ID NO: 244, respectively. In an aspect, the first gRNA molecule and the second gRNA molecule include targeting domains comprising, e.g., consisting of, SEQ ID NO: 336 and SEQ ID NO: 199, respectively. In an aspect, the first gRNA molecule and the second gRNA molecule include targeting domains comprising, e.g., consisting of, SEQ ID NO: 336 and SEQ ID NO: 251, respectively. In an aspect, the first gRNA molecule and the second gRNA molecule include targeting domains comprising, e.g., consisting of, SEQ ID NO: 336 and SEQ ID NO: 250, respectively. In an aspect, the first gRNA molecule and the second gRNA molecule include targeting domains comprising, e.g., consisting of, SEQ ID NO: 336 and SEQ ID NO: 334, respectively. In an aspect, the first gRNA molecule and the second gRNA molecule include targeting domains comprising, e.g., consisting of, SEQ ID NO: 336 and SEQ ID NO: 185, respectively. In an aspect, the first gRNA molecule and the second gRNA molecule include targeting domains comprising, e.g., consisting of, SEQ ID NO: 336 and SEQ ID NO: 186, respectively. In an aspect, the first gRNA molecule and the second gRNA molecule include targeting domains comprising, e.g., consisting of, SEQ ID NO: 336 and SEQ ID NO: 337, respectively. In an aspect, the first gRNA molecule and the second gRNA molecule include targeting domains comprising, e.g., consisting of, SEQ ID NO: 336 and SEQ ID NO: 246, respectively. In an aspect, the first gRNA molecule and the second gRNA molecule include targeting domains comprising, e.g., consisting of, SEQ ID NO: 336 and SEQ ID NO: 248, respectively. In an aspect, the first gRNA molecule and the second gRNA molecule include targeting domains comprising, e.g., consisting of, SEQ ID NO: 336 and SEQ ID NO: 247, respectively. In an aspect, the first gRNA molecule and the second gRNA molecule include targeting domains comprising, e.g., consisting of, SEQ ID NO: 336 and SEQ ID NO: 245, respectively. In an aspect, the first gRNA molecule and the second gRNA molecule include targeting domains comprising, e.g., consisting of, SEQ ID NO: 336 and SEQ ID NO: 249, respectively. In an aspect, the first gRNA molecule and the second gRNA molecule include targeting domains comprising, e.g., consisting of, SEQ ID NO: 336 and SEQ ID NO: 244, respectively. In an aspect, the first gRNA molecule and the second gRNA molecule include targeting domains comprising, e.g., consisting of, SEQ ID NO: 336 and SEQ ID NO: 199, respectively. In an aspect, the first gRNA molecule and the second gRNA molecule include targeting domains comprising, e.g., consisting of, SEQ ID NO: 336 and SEQ ID NO: 251, respectively. In an aspect, the first gRNA molecule and the second gRNA molecule include targeting domains comprising, e.g., consisting of, SEQ ID NO: 336 and SEQ ID NO: 250, respectively. In an aspect, the first gRNA molecule and the second gRNA molecule include targeting domains comprising, e.g., consisting of, SEQ ID NO: 336 and SEQ ID NO: 334, respectively. In an aspect, the first gRNA molecule and the second gRNA molecule include targeting domains comprising, e.g., consisting of, SEQ ID NO: 336 and SEQ ID NO: 185, respectively. In an aspect, the first gRNA molecule and the second gRNA molecule include targeting domains comprising, e.g., consisting of, SEQ ID NO: 336 and SEQ ID NO: 186, respectively. In an aspect, the first gRNA molecule and the second gRNA molecule include targeting domains comprising, e.g., consisting of, SEQ ID NO: 336 and SEQ ID NO: 337, respectively. In an aspect, the first gRNA molecule and the second gRNA molecule include targeting domains comprising, e.g., consisting of, SEQ ID NO: 337 and SEQ ID NO: 244, respectively. In an aspect, the first gRNA molecule and the second gRNA molecule include targeting domains comprising, e.g., consisting of, SEQ ID NO: 337 and SEQ ID NO: 199, respectively. In an aspect, the first gRNA molecule and the second gRNA molecule include targeting domains comprising, e.g., consisting of, SEQ ID NO: 337 and SEQ ID NO: 251, respectively. In an aspect, the first gRNA molecule and the second gRNA molecule include targeting domains comprising, e.g., consisting of, SEQ ID NO: 337 and SEQ ID NO: 250, respectively. In an aspect, the first gRNA molecule and the second gRNA molecule include targeting domains comprising, e.g., consisting of, SEQ ID NO: 337 and SEQ ID NO: 334, respectively. In an aspect, the first gRNA molecule and the second gRNA molecule include targeting domains comprising, e.g., consisting of, SEQ ID NO: 337 and SEQ ID NO: 185, respectively. In an aspect, the first gRNA molecule and the second gRNA molecule include targeting domains comprising, e.g., consisting of, SEQ ID NO: 337 and SEQ ID NO: 186, respectively. In an aspect, the first gRNA molecule and the second gRNA molecule include targeting domains comprising, e.g., consisting of, SEQ ID NO: 337 and SEQ ID NO: 336, respectively. In an aspect, the first gRNA molecule and the second gRNA molecule include targeting domains comprising, e.g., consisting of, SEQ ID NO: 337 and SEQ ID NO: 246, respectively. In an aspect, the first gRNA molecule and the second gRNA molecule include targeting domains comprising, e.g., consisting of, SEQ ID NO: 337 and SEQ ID NO: 248, respectively. In an aspect, the first gRNA molecule and the second gRNA molecule include targeting domains comprising, e.g., consisting of, SEQ ID NO: 337 and SEQ ID NO: 247, respectively. In an aspect, the first gRNA molecule and the second gRNA molecule include targeting domains comprising, e.g., consisting of, SEQ ID NO: 337 and SEQ ID NO: 245, respectively. In an aspect, the first gRNA molecule and the second gRNA molecule include targeting domains comprising, e.g., consisting of, SEQ ID NO: 337 and SEQ ID NO: 249, respectively. In an aspect, the first gRNA molecule and the second gRNA molecule include targeting domains comprising, e.g., consisting of, SEQ ID NO: 337 and SEQ ID NO: 244, respectively. In an aspect, the first gRNA molecule and the second gRNA molecule include targeting domains comprising, e.g., consisting of, SEQ ID NO: 337 and SEQ ID NO: 199, respectively. In an aspect, the first gRNA molecule and the second gRNA molecule include targeting domains comprising, e.g., consisting of, SEQ ID NO: 337 and SEQ ID NO: 251, respectively. In an aspect, the first gRNA molecule and the second gRNA molecule include targeting domains comprising, e.g., consisting of, SEQ ID NO: 337 and SEQ ID NO: 250, respectively. In an aspect, the first gRNA molecule and the second gRNA molecule include targeting domains comprising, e.g., consisting of, SEQ ID NO: 337 and SEQ ID NO: 334, respectively. In an aspect, the first gRNA molecule and the second gRNA molecule include targeting domains comprising, e.g., consisting of, SEQ ID NO: 337 and SEQ ID NO: 185, respectively. In an aspect, the first gRNA molecule and the second gRNA molecule include targeting domains comprising, e.g., consisting of, SEQ ID NO: 337 and SEQ ID NO: 186, respectively. In an aspect, the first gRNA molecule and the second gRNA molecule include targeting domains comprising, e.g., consisting of, SEQ ID NO: 337 and SEQ ID NO: 336, respectively.

[0470] In embodiments, the aspects of the invention relate to or incorporate a gRNA molecule that is complementary to a target sequence within the +58 enhancer region of the BCL11a gene which is disposed 3′ to the GATA-1 binding site, e.g., 3′ to the GATA1 binding site and TAL-1 binding site. In embodiments, the CRISPR system comprising a gRNA molecule described herein induces one or more indels at or near the target site. In embodiments, the indel does not comprise a nucleotide of a GATA-1 binding site and/or does not comprise a nucleotide of a TAL-1 binding site. In embodiments, the CRISPR system induces one or more frameshift indels at or near the target site, e.g., at an overall frameshift indel rate of at least about 10%, at least about 20%, at least about 30%, at least about 40%, or at least about 50%, e.g., as measured by NGS. In embodiments, the overall indel rate is at least about 70%, at least about 80%, at least about 90%, or at least about 95%, e.g., as measured by NGS.

TABLE 8
Preferred Guide RNA Targeting Domains directed to the +62 Enhancer
Region of the BCL11a Gene (i.e., to a BCL11a Enhancer)

| | Exon/ | | | | SEQ ID |
|---|---|---|---|---|---|
| Id. | Feature | Strand | Targeting domain | Locations | NO: |
| CR00171 | 62 | − | AGCUCUGGAAUGAUGGCUUA | Chr2: 60490354-60490376 | 278 |
| CR00172 | 62 | − | AUUGUGGAGCUCUGGAAUGA | Chr2: 60490361-60490383 | 279 |
| CR00173 | 62 | − | CUGGAAUAGAAAAUUGGAGU | Chr2: 60490384-60490406 | 280 |
| CR00174 | 62 | − | UGGGUACGGGGAACUAAGAC | Chr2: 60490403-60490425 | 281 |
| CR00175 | 62 | + | UUAGUUCCCCGUACCCAUCA | Chr2: 60490409-60490431 | 282 |
| CR00176 | 62 | − | UAUUUUCCUUGAUGGGUACG | Chr2: 60490415-60490437 | 283 |
| CR00177 | 62 | − | AUAUUUUCCUUGAUGGGUAC | Chr2: 60490416-60490438 | 284 |
| CR00178 | 62 | − | AAUAUUUUCCUUGAUGGGUA | Chr2: 60490417-60490439 | 285 |
| CR00179 | 62 | − | GGAAGGAAAUGAGAACGGAA | Chr2: 60490456-60490478 | 286 |
| CR00180 | 62 | − | AGGAAGGAAAUGAGAACGGA | Chr2: 60490457-60490479 | 287 |
| CR00181 | 62 | + | AUACUUCAAGGCCUCAAUGA | Chr2: 60490520-60490542 | 288 |
| CR00182 | 62 | − | GACUAGGUAGACCUUCAUUG | Chr2: 60490531-60490553 | 289 |
| CR00183 | 62 | − | UUCUUCUUGCUAAGGUGACU | Chr2: 60490547-60490569 | 290 |
| CR00184 | 62 | − | GAGAUUGAUUCUUCUUGCUA | Chr2: 60490555-60490577 | 291 |
| CR00185 | 62 | − | GUGUUCUAUGAGGUUGGAGA | Chr2: 60490580-60490602 | 292 |
| CR00186 | 62 | − | GGAUGAGUGUUCUAUGAGGU | Chr2: 60490586-60490608 | 293 |
| CR00187 | 62 | − | CAUGGGAUGAGUGUUCUAUG | Chr2: 60490590-60490612 | 294 |
| CR00188 | 62 | − | UGAGUCAGGGAGUGGUGCAU | Chr2: 60490607-60490629 | 295 |
| CR00189 | 62 | − | AUGAGUCAGGGAGUGGUGCA | Chr2: 60490608-60490630 | 296 |
| CR00190 | 62 | + | CCACUCCCUGACUCAUAUCU | Chr2: 60490615-60490637 | 297 |
| CR00191 | 62 | − | UAAGGCCUAGAUAUGAGUCA | Chr2: 60490620-60490642 | 298 |
| CR00192 | 62 | − | GUAAGGCCUAGAUAUGAGUC | Chr2: 60490621-60490643 | 299 |
| CR00193 | 62 | + | AUAUCUAGGCCUUACAUUGC | Chr2: 60490629-60490651 | 300 |
| CR00194 | 62 | − | AAAUUAAUUAGAGGCAUAGA | Chr2: 60490656-60490678 | 301 |
| CR00195 | 62 | − | GAAAUUAAUUAGAGGCAUAG | Chr2: 60490657-60490679 | 302 |
| CR00196 | 62 | − | GAACACAUGAAAUUAAUUAG | Chr2: 60490665-60490687 | 303 |
| CR00197 | 62 | + | CCAAUGAGUUUCUUCAAUAC | Chr2: 60490688-60490710 | 304 |
| CR00198 | 62 | − | CAAAUAUAAUAGAAGCAAGU | Chr2: 60490721-60490743 | 305 |
| CR00199 | 62 | − | AAAUAACUUCCCUUUUAGGA | Chr2: 60490821-60490843 | 306 |
| CR00200 | 62 | − | GGAAAAAUAACUUCCCUUUU | Chr2: 60490825-60490847 | 307 |
| CR00201 | 62 | − | UUUUGAACAGAAAUGAUAUU | Chr2: 60490846-60490868 | 308 |
| CR00202 | 62 | − | AGUUCAAGUAGAUAUCAGAA | Chr2: 60490905-60490927 | 309 |
| CR00203 | 62 | − | AAGUUCAAGUAGAUAUCAGA | Chr2: 60490906-60490928 | 310 |
| CR00204 | 62 | − | GGGUGGCUGUUUAAAGAGGG | Chr2: 60490994-60491016 | 311 |
| CR00205 | 62 | − | GUGGGGUGGCUGUUUAAAGA | Chr2: 60490997-60491019 | 312 |
| CR00206 | 62 | − | UGUGGGGUGGCUGUUUAAAG | Chr2: 60490998-60491020 | 313 |
| CR00207 | 62 | + | UGCCAACCAGACUGUGCGCC | Chr2: 60491051-60491073 | 314 |
| CR00208 | 62 | − | AACCUGGCGCACAGUCUGGU | Chr2: 60491053-60491075 | 315 |
| CR00209 | 62 | + | AACCAGACUGUGCGCCAGGU | Chr2: 60491055-60491077 | 316 |
| CR00210 | 62 | − | UACCAACCUGGCGCACAGUC | Chr2: 60491057-60491079 | 317 |
| CR00211 | 62 | − | UCUGUCAGACUUUACCAACC | Chr2: 60491069-60491091 | 318 |
| CR00212 | 62 | + | AUAUGUGAAGCCCAACUACG | Chr2: 60491118-60491140 | 319 |
| CR00213 | 62 | − | AGUUGCACAACCACGUAGUU | Chr2: 60491128-60491150 | 320 |
| CR00214 | 62 | − | GAGUUGCACAACCACGUAGU | Chr2: 60491129-60491151 | 321 |
| CR00215 | 62 | + | CUAUAGCUGACUUUCAACCA | Chr2: 60491151-60491173 | 322 |
| CR00216 | 62 | − | AACUUCUUUGCAGAUGACCA | Chr2: 60491168-60491190 | 323 |
| CR00217 | 62 | − | UUGCAUUGAGGAUGCGCAGG | Chr2: 60491199-60491221 | 324 |
| CR00218 | 62 | − | UUUUUGCAUUGAGGAUGCGC | Chr2: 60491202-60491224 | 325 |
| CR00221 | 62 | + | GACCUCAUUUUGAUGCCAGA | Chr2: 60491281-60491303 | 326 |
| CR00222 | 62 | − | UGCCCUCUGGCAUCAAAAUG | Chr2: 60491283-60491305 | 327 |
| CR00223 | 62 | + | AUGCCAGAGGGCAGCAAACA | Chr2: 60491293-60491315 | 328 |
| CR00224 | 62 | − | CUGUACUUAAUAGCUGAAGG | Chr2: 60491326-60491348 | 329 |
| CR00225 | 62 | − | ACUGUACUUAAUAGCUGAAG | Chr2: 60491327-60491349 | 330 |
| CR00227 | 62 | + | CAGCUAUUAAGUACAGUAAA | Chr2: 60491333-60491355 | 331 |
| CR00228 | 62 | − | GAGCAUUUCAAAUGAUAGUU | Chr2: 60491360-60491382 | 332 |
| CR00229 | 62 | + | CAUUUGAAAUGCUCCCGGCC | Chr2: 60491369-60491391 | 333 |

[0471] In some aspects of the invention, it is preferred that the gRNA molecule to the +62 Enhancer region of BCL11a comprise a targeting domain of a gRNA listed in FIG. 12. In an aspect, the gRNA molecule includes a targeting domain comprising, e.g., consisting of, SEQ ID NO: 318. In an aspect, the gRNA molecule includes a targeting domain comprising, e.g., consisting of, SEQ ID NO: 312. In an aspect, the gRNA molecule includes a targeting domain comprising, e.g., consisting of, SEQ ID NO: 313. In an aspect, the gRNA molecule includes a targeting domain comprising, e.g., consisting of, SEQ ID NO: 294. In an aspect, the gRNA molecule includes a targeting domain comprising, e.g., consisting of, SEQ ID NO: 310. In an aspect, the gRNA molecule includes a targeting domain comprising, e.g., consisting of, SEQ ID NO: 319. In an aspect, the gRNA molecule includes a targeting domain comprising, e.g., consisting of, SEQ ID NO: 298. In an aspect, the gRNA molecule includes a targeting domain comprising, e.g., consisting of, SEQ ID NO: 322. In an aspect, the gRNA molecule includes a targeting domain comprising, e.g., consisting of, SEQ ID NO: 311. In an aspect, the gRNA molecule includes a targeting domain comprising, e.g., consisting of, SEQ ID NO: 315. In an aspect, the gRNA molecule includes a targeting domain comprising, e.g., consisting of, SEQ ID NO: 290. In an aspect, the gRNA molecule includes a targeting domain comprising, e.g., consisting of, SEQ ID NO: 317. In an aspect, the gRNA molecule includes a targeting domain comprising, e.g., consisting of, SEQ ID NO: 309. In an aspect, the gRNA molecule includes a targeting domain comprising, e.g., consisting of, SEQ ID NO: 289. In an aspect, the gRNA molecule includes a targeting domain comprising, e.g., consisting of, SEQ ID NO: 281.

[0472] In some aspects of the invention, e.g., as indicated herein, it may be beneficial to include gRNA moleucles targeting more than one, e.g., two, target sites (e.g., a first gRNA molecule and a second gRNA molecule). In some embodiments, the two target sites are both located in the +62 BCL11a enhancer region. In such aspects, any combination of more than one, e.g., two, gRNA molecules (e.g., a first gRNA molecule and a second gRNA molecule) comprising targeting domains listed in Table 8 may be used. In an aspect, the first gRNA molecule and the second gRNA molecule include targeting domains comprising, e.g., consisting of, SEQ ID NO: 318 and SEQ ID NO: 312, respectively. In an aspect, the first gRNA molecule and the second gRNA molecule include targeting domains comprising, e.g., consisting of, SEQ ID NO: 318 and SEQ ID NO: 313, respectively. In an aspect, the first gRNA molecule and the second gRNA molecule include targeting domains comprising, e.g., consisting of, SEQ ID NO: 318 and SEQ ID NO: 294, respectively. In an aspect, the first gRNA molecule and the second gRNA molecule include targeting domains comprising, e.g., consisting of, SEQ ID NO: 318 and SEQ ID NO: 310, respectively. In an aspect, the first gRNA molecule and the second gRNA molecule include targeting domains comprising, e.g., consisting of, SEQ ID NO: 318 and SEQ ID NO: 319, respectively.

[0473] In an aspect, the first gRNA molecule and the second gRNA molecule include targeting domains comprising, e.g., consisting of, SEQ ID NO: 318 and SEQ ID NO: 298, respectively. In an aspect, the first gRNA molecule and the second gRNA molecule include targeting domains comprising, e.g., consisting of, SEQ ID NO: 318 and SEQ ID NO: 322, respectively. In an aspect, the first gRNA molecule and the second gRNA molecule include targeting domains comprising, e.g., consisting of, SEQ ID NO: 318 and SEQ ID NO: 311, respectively. In an aspect, the first gRNA molecule and the second gRNA molecule include targeting domains comprising, e.g., consisting of, SEQ ID NO: 318 and SEQ ID NO: 315, respectively. In an aspect, the first gRNA molecule and the second gRNA molecule include targeting domains comprising, e.g., consisting of, SEQ ID NO: 318 and SEQ ID NO: 290, respectively. In an aspect, the first gRNA molecule and the second gRNA molecule include targeting domains comprising, e.g., consisting of, SEQ ID NO: 318 and SEQ ID NO: 317, respectively. In an aspect, the first gRNA molecule and the second gRNA molecule include targeting domains comprising, e.g., consisting of, SEQ ID NO: 318 and SEQ ID NO: 309, respectively. In an aspect, the first gRNA molecule and the second gRNA molecule include targeting domains comprising, e.g., consisting of, SEQ ID NO: 318 and SEQ ID NO: 289, respectively. In an aspect, the first gRNA molecule and the second gRNA molecule include targeting domains comprising, e.g., consisting of, SEQ ID NO: 318 and SEQ ID NO: 281, respectively. In an aspect, the first gRNA molecule and the second gRNA molecule include targeting domains comprising, e.g., consisting of, SEQ ID NO: 312 and SEQ ID NO: 313, respectively. In an aspect, the first gRNA molecule and the second gRNA molecule include targeting domains comprising, e.g., consisting of, SEQ ID NO: 312 and SEQ ID NO: 294, respectively. In an aspect, the first gRNA molecule and the second gRNA molecule include targeting domains comprising, e.g., consisting of, SEQ ID NO: 312 and SEQ ID NO: 310, respectively. In an aspect, the first gRNA molecule and the second gRNA molecule include targeting domains comprising, e.g., consisting of, SEQ ID NO: 312 and SEQ ID NO: 319, respectively. In an aspect, the first gRNA molecule and the second gRNA molecule include targeting domains comprising, e.g., consisting of, SEQ ID NO: 312 and SEQ ID NO: 298, respectively. In an aspect, the first gRNA molecule and the second gRNA molecule include targeting domains comprising, e.g., consisting of, SEQ ID NO: 312 and SEQ ID NO: 322, respectively. In an aspect, the first gRNA molecule and the second gRNA molecule include targeting domains comprising, e.g., consisting of, SEQ ID NO: 312 and SEQ ID NO: 311, respectively. In an aspect, the first gRNA molecule and the second gRNA molecule include targeting domains comprising, e.g., consisting of, SEQ ID NO: 312 and SEQ ID NO: 315, respectively. In an aspect, the first gRNA molecule and the second gRNA molecule include targeting domains comprising, e.g., consisting of, SEQ ID NO: 312 and SEQ ID NO: 290, respectively. In an aspect, the first gRNA molecule and the second gRNA molecule include targeting domains comprising, e.g., consisting of, SEQ ID NO: 312 and SEQ ID NO: 317, respectively. In an aspect, the first gRNA molecule and the second gRNA molecule include targeting domains comprising, e.g., consisting of, SEQ ID NO: 312 and SEQ ID NO: 309, respectively. In an aspect, the first gRNA molecule and the second gRNA molecule include targeting domains comprising, e.g., consisting of, SEQ ID NO: 312 and SEQ ID NO: 289, respectively. In an aspect, the first gRNA molecule and the second gRNA molecule include targeting domains comprising, e.g., consisting of, SEQ ID NO: 312 and SEQ ID NO: 281, respectively. In an aspect, the first gRNA molecule and the second gRNA molecule include targeting domains comprising, e.g., consisting of, SEQ ID NO: 313 and SEQ ID NO: 312, respectively. In an aspect, the first gRNA molecule and the second gRNA molecule include targeting domains comprising, e.g., consisting of, SEQ ID NO: 313 and SEQ ID NO: 294, respectively. In an aspect, the first gRNA molecule and the second gRNA molecule include targeting domains comprising, e.g., consisting of, SEQ ID NO: 313 and SEQ ID NO: 310, respectively. In an aspect, the first gRNA molecule and the second gRNA molecule include targeting domains comprising, e.g., consisting of, SEQ ID NO: 313 and SEQ ID NO: 319, respectively. In an aspect, the first gRNA molecule and the second gRNA molecule include targeting domains comprising, e.g., consisting of, SEQ ID NO: 313 and SEQ ID NO: 298, respectively. In an aspect, the first gRNA molecule and the second gRNA molecule include targeting domains comprising, e.g., consisting of, SEQ ID NO: 313 and SEQ ID NO: 322, respectively. In an aspect, the first gRNA molecule and the second gRNA molecule include targeting domains comprising, e.g., consisting of, SEQ ID NO: 313 and SEQ ID NO: 311, respectively. In an aspect, the first gRNA molecule and the second gRNA molecule include targeting domains comprising, e.g., consisting of, SEQ ID NO: 313 and SEQ ID NO: 315, respectively. In an aspect, the first gRNA molecule and the second gRNA molecule include targeting domains comprising, e.g., consisting of, SEQ ID NO: 313 and SEQ ID NO: 290, respectively. In an aspect, the first gRNA molecule and the second gRNA molecule include targeting domains comprising, e.g., consisting of, SEQ ID NO: 313 and SEQ ID NO: 317, respectively. In an aspect, the first gRNA molecule and the second gRNA molecule include targeting domains comprising, e.g., consisting of, SEQ ID NO: 313 and SEQ ID NO: 309, respectively. In an aspect, the first gRNA molecule and the second gRNA molecule include targeting domains comprising, e.g., consisting of, SEQ ID NO: 313 and SEQ ID NO: 289, respectively. In an aspect, the first gRNA molecule and the second gRNA molecule include targeting domains comprising, e.g., consisting of, SEQ ID NO: 313 and SEQ ID NO: 281, respectively. In an aspect, the first gRNA molecule and the second gRNA molecule include targeting domains comprising, e.g., consisting of, SEQ ID NO: 294 and SEQ ID NO: 312, respectively. In an aspect, the first gRNA molecule and the second gRNA molecule include targeting domains comprising, e.g., consisting of, SEQ ID NO: 294 and SEQ ID NO: 313, respectively. In an aspect, the first gRNA molecule and the second gRNA molecule include targeting domains comprising, e.g., consisting of, SEQ ID NO: 294 and SEQ ID NO: 310, respectively. In an aspect, the first gRNA molecule and the second gRNA molecule include targeting domains comprising, e.g., consisting of, SEQ ID NO: 294 and SEQ ID NO: 319, respectively. In an aspect, the first gRNA molecule and the second gRNA molecule include targeting domains comprising, e.g., consisting of, SEQ ID NO: 294 and SEQ ID NO: 298, respectively. In an aspect, the first gRNA molecule and the second gRNA molecule include targeting domains comprising, e.g., consisting of, SEQ ID NO: 294 and SEQ ID NO: 322, respectively. In an aspect, the first gRNA molecule and the second gRNA molecule include targeting domains comprising, e.g., consisting of, SEQ ID NO: 294 and SEQ ID NO: 311, respectively. In an aspect, the first gRNA molecule and the second gRNA molecule include targeting domains comprising, e.g., consisting of, SEQ ID NO: 294 and SEQ ID NO: 315, respectively. In an aspect, the first gRNA molecule and the second gRNA molecule include targeting domains comprising, e.g., consisting of, SEQ ID NO: 294 and SEQ ID NO: 290, respectively. In an aspect, the first gRNA molecule and the second gRNA molecule include targeting domains comprising, e.g., consisting of, SEQ ID NO: 294 and SEQ ID NO: 317, respectively. In an aspect, the first gRNA molecule and the second gRNA molecule include targeting domains comprising, e.g., consisting of, SEQ ID NO: 294 and SEQ ID NO: 309, respectively. In an aspect, the first gRNA molecule and the second gRNA molecule include targeting domains comprising, e.g., consisting of, SEQ ID NO: 294 and SEQ ID NO: 289, respectively. In an aspect, the first gRNA molecule and the second gRNA molecule include targeting domains comprising, e.g., consisting of, SEQ ID NO: 294 and SEQ ID NO: 281, respectively. In an aspect, the first gRNA molecule and the second gRNA molecule include targeting domains comprising, e.g., consisting of, SEQ ID NO: 310 and SEQ ID NO: 312, respectively. In an aspect, the first gRNA molecule and the second gRNA molecule include targeting domains comprising, e.g., consisting of, SEQ ID NO: 310 and SEQ ID NO: 313, respectively. In an aspect, the first gRNA molecule and the second gRNA molecule include targeting domains comprising, e.g., consisting of, SEQ ID NO: 310 and SEQ ID NO: 294, respectively. In an aspect, the first gRNA molecule and the second gRNA molecule include targeting domains comprising, e.g., consisting of, SEQ ID NO: 310 and SEQ ID NO: 319, respectively. In an aspect, the first gRNA molecule and the second gRNA molecule include targeting domains comprising, e.g., consisting of, SEQ ID NO: 310 and SEQ ID NO: 298, respectively. In an aspect, the first gRNA molecule and the second gRNA molecule include targeting domains comprising, e.g., consisting of, SEQ ID NO: 310 and SEQ ID NO: 322, respectively. In an aspect, the first gRNA molecule and the second gRNA molecule include targeting domains comprising, e.g., consisting of, SEQ ID NO: 310 and SEQ ID NO: 311, respectively. In an aspect, the first gRNA molecule and the second gRNA molecule include targeting domains comprising, e.g., consisting of, SEQ ID NO: 310 and SEQ ID NO: 315, respectively. In an aspect, the first gRNA molecule and the second gRNA molecule include targeting domains comprising, e.g., consisting of, SEQ ID NO: 310 and SEQ ID NO: 290, respectively. In an aspect, the first gRNA molecule and the second gRNA molecule include targeting domains comprising, e.g., consisting of, SEQ ID NO: 310 and SEQ ID NO: 317, respectively. In an aspect, the first gRNA molecule and the second gRNA molecule include targeting domains comprising, e.g., consisting of, SEQ ID NO: 310 and SEQ ID NO: 309, respectively. In an aspect, the first gRNA molecule and the second gRNA molecule include targeting domains comprising, e.g., consisting of, SEQ ID NO: 310 and SEQ ID NO: 289, respectively. In an aspect, the first gRNA molecule and the second gRNA molecule include targeting domains comprising, e.g., consisting of, SEQ ID NO: 310 and SEQ ID NO: 281, respectively. In an aspect, the first gRNA molecule and the second gRNA molecule include targeting domains comprising, e.g., consisting of, SEQ ID NO: 319 and SEQ ID NO: 312, respectively. In an aspect, the first gRNA molecule and the second gRNA molecule include targeting domains comprising, e.g., consisting of, SEQ ID NO: 319 and SEQ ID NO: 313, respectively. In an aspect, the first gRNA molecule and the second gRNA molecule include targeting domains comprising, e.g., consisting of, SEQ ID NO: 319 and SEQ ID NO: 294, respectively. In an aspect, the first gRNA molecule and the second gRNA molecule include targeting domains comprising, e.g., consisting of, SEQ ID NO: 319 and SEQ ID NO: 310, respectively. In an aspect, the first gRNA molecule and the second gRNA molecule include targeting domains comprising, e.g., consisting of, SEQ ID NO: 319 and SEQ ID NO: 298, respectively. In an aspect, the first gRNA molecule and the second gRNA molecule include targeting domains comprising, e.g., consisting of, SEQ ID NO: 319 and SEQ ID NO: 322, respectively. In an aspect, the first gRNA molecule and the second gRNA molecule include targeting domains comprising, e.g., consisting of, SEQ ID NO: 319 and SEQ ID NO: 311, respectively. In an aspect, the first gRNA molecule and the second gRNA molecule include targeting domains comprising, e.g., consisting of, SEQ ID NO: 319 and SEQ ID NO: 315, respectively. In an aspect, the first gRNA molecule and the second gRNA molecule include targeting domains comprising, e.g., consisting of, SEQ ID NO: 319 and SEQ ID NO: 290, respectively. In an aspect, the first gRNA molecule and the second gRNA molecule include targeting domains comprising, e.g., consisting of, SEQ ID NO: 319 and SEQ ID NO: 317, respectively. In an aspect, the first gRNA molecule and the second gRNA molecule include targeting domains comprising, e.g., consisting of, SEQ ID NO: 319 and SEQ ID NO: 309, respectively. In an aspect, the first gRNA molecule and the second gRNA molecule include targeting domains comprising, e.g., consisting of, SEQ ID NO: 319 and SEQ ID NO: 289, respectively. In an aspect, the first gRNA molecule and the second gRNA molecule include targeting domains comprising, e.g., consisting of, SEQ ID NO: 319 and SEQ ID NO: 281, respectively. In an aspect, the first gRNA molecule and the second gRNA molecule include targeting domains comprising, e.g., consisting of, SEQ ID NO: 298 and SEQ ID NO: 312, respectively. In an aspect, the first gRNA molecule and the second gRNA molecule include targeting domains comprising, e.g., consisting of, SEQ ID NO: 298 and SEQ ID NO: 313, respectively. In an aspect, the first gRNA molecule and the second gRNA molecule include targeting domains comprising, e.g., consisting of, SEQ ID NO: 298 and SEQ ID NO: 294, respectively. In an aspect, the first gRNA molecule and the second gRNA molecule include targeting domains comprising, e.g., consisting of, SEQ ID NO: 298 and SEQ ID NO: 310, respectively. In an aspect, the first gRNA molecule and the second gRNA molecule include targeting domains comprising, e.g., consisting of, SEQ ID NO: 298 and SEQ ID NO: 319, respectively. In an aspect, the first gRNA molecule and the second gRNA molecule include targeting domains comprising, e.g., consisting of, SEQ ID NO: 298 and SEQ ID NO: 322, respectively. In an aspect, the first gRNA molecule and the second gRNA molecule include targeting domains comprising, e.g., consisting of, SEQ ID NO: 298 and SEQ ID NO: 311, respectively. In an aspect, the first gRNA molecule and the second gRNA molecule include targeting domains comprising, e.g., consisting of, SEQ ID NO: 298 and SEQ ID NO: 315, respectively. In an aspect, the first gRNA molecule and the second gRNA molecule include targeting domains comprising, e.g., consisting of, SEQ ID NO: 298 and SEQ ID NO: 290, respectively. In an aspect, the first gRNA molecule and the second gRNA molecule include targeting domains comprising, e.g., consisting of, SEQ ID NO: 298 and SEQ ID NO: 317, respectively. In an aspect, the first gRNA molecule and the second gRNA molecule include targeting domains comprising, e.g., consisting of, SEQ ID NO: 298 and SEQ ID NO: 309, respectively. In an aspect, the first gRNA molecule and the second gRNA molecule include targeting domains comprising, e.g., consisting of, SEQ ID NO: 298 and SEQ ID NO: 289, respectively. In an aspect, the first gRNA molecule and the second gRNA molecule include targeting domains comprising, e.g., consisting of, SEQ ID NO: 298 and SEQ ID NO: 281, respectively. In an aspect, the first gRNA molecule and the second gRNA molecule include targeting domains comprising, e.g., consisting of, SEQ ID NO: 322 and SEQ ID NO: 312, respectively. In an aspect, the first gRNA molecule and the second gRNA molecule include targeting domains comprising, e.g., consisting of, SEQ ID NO: 322 and SEQ ID NO: 313, respectively. In an aspect, the first gRNA molecule and the second gRNA molecule include targeting domains comprising, e.g., consisting of, SEQ ID NO: 322 and SEQ ID NO: 294, respectively. In an aspect, the first gRNA molecule and the second gRNA molecule include targeting domains comprising, e.g., consisting of, SEQ ID NO: 322 and SEQ ID NO: 310, respectively. In an aspect, the first gRNA molecule and the second gRNA molecule include targeting domains comprising, e.g., consisting of, SEQ ID NO: 322 and SEQ ID NO: 319, respectively. In an aspect, the first gRNA molecule and the second gRNA molecule include targeting domains comprising, e.g., consisting of, SEQ ID NO: 322 and SEQ ID NO: 298, respectively. In an aspect, the first gRNA molecule and the second gRNA molecule include targeting domains comprising, e.g., consisting of, SEQ ID NO: 322 and SEQ ID NO: 311, respectively. In an aspect, the first gRNA molecule and the second gRNA molecule include targeting domains comprising, e.g., consisting of, SEQ ID NO: 322 and SEQ ID NO: 315, respectively. In an aspect, the first gRNA molecule and the second gRNA molecule include targeting domains comprising, e.g., consisting of, SEQ ID NO: 322 and SEQ ID NO: 290, respectively. In an aspect, the first gRNA molecule and the second gRNA molecule include targeting domains comprising, e.g., consisting of, SEQ ID NO: 322 and SEQ ID NO: 317, respectively. In an aspect, the first gRNA molecule and the second gRNA molecule include targeting domains comprising, e.g., consisting of, SEQ ID NO: 322 and SEQ ID NO: 309, respectively. In an aspect, the first gRNA molecule and the second gRNA molecule include targeting domains comprising, e.g., consisting of, SEQ ID NO: 322 and SEQ ID NO: 289, respectively. In an aspect, the first gRNA molecule and the second gRNA molecule include targeting domains comprising, e.g., consisting of, SEQ ID NO: 322 and SEQ ID NO: 281, respectively. In an aspect, the first gRNA molecule and the second gRNA molecule include targeting domains comprising, e.g., consisting of, SEQ ID NO: 311 and SEQ ID NO: 312, respectively. In an aspect, the first gRNA molecule and the second gRNA molecule include targeting domains comprising, e.g., consisting of, SEQ ID NO: 311 and SEQ ID NO: 313, respectively. In an aspect, the first gRNA molecule and the second gRNA molecule include targeting domains comprising, e.g., consisting of, SEQ ID NO: 311 and SEQ ID NO: 294, respectively. In an aspect, the first gRNA molecule and the second gRNA molecule include targeting domains comprising, e.g., consisting of, SEQ ID NO: 311 and SEQ ID NO: 310, respectively. In an aspect, the first gRNA molecule and the second gRNA molecule include targeting domains comprising, e.g., consisting of, SEQ ID NO: 311 and SEQ ID NO: 319, respectively. In an aspect, the first gRNA molecule and the second gRNA molecule include targeting domains comprising, e.g., consisting of, SEQ ID NO: 311 and SEQ ID NO: 298, respectively. In an aspect, the first gRNA molecule and the second gRNA molecule include targeting domains comprising, e.g., consisting of, SEQ ID NO: 311 and SEQ ID NO: 322, respectively. In an aspect, the first gRNA molecule and the second gRNA molecule include targeting domains comprising, e.g., consisting of, SEQ ID NO: 311 and SEQ ID NO: 315, respectively. In an aspect, the first gRNA molecule and the second gRNA molecule include targeting domains comprising, e.g., consisting of, SEQ ID NO: 311 and SEQ ID NO: 290, respectively. In an aspect, the first gRNA molecule and the second gRNA molecule include targeting domains comprising, e.g., consisting of, SEQ ID NO: 311 and SEQ ID NO: 317, respectively. In an aspect, the first gRNA molecule and the second gRNA molecule include targeting domains comprising, e.g., consisting of, SEQ ID NO: 311 and SEQ ID NO: 309, respectively. In an aspect, the first gRNA molecule and the second gRNA molecule include targeting domains comprising, e.g., consisting of, SEQ ID NO: 311 and SEQ ID NO: 289, respectively. In an aspect, the first gRNA molecule and the second gRNA molecule include targeting domains comprising, e.g., consisting of, SEQ ID NO: 311 and SEQ ID NO: 281, respectively. In an aspect, the first gRNA molecule and the second gRNA molecule include targeting domains comprising, e.g., consisting of, SEQ ID NO: 315 and SEQ ID NO: 312, respectively. In an aspect, the first gRNA molecule and the second gRNA molecule include targeting domains comprising, e.g., consisting of, SEQ ID NO: 315 and SEQ ID NO: 313, respectively. In an aspect, the first gRNA molecule and the second gRNA molecule include targeting domains comprising, e.g., consisting of, SEQ ID NO: 315 and SEQ ID NO: 294, respectively. In an aspect, the first gRNA molecule and the second gRNA molecule include targeting domains comprising, e.g., consisting of, SEQ ID NO: 315 and SEQ ID NO: 310, respectively. In an aspect, the first gRNA molecule and the second gRNA molecule include targeting domains comprising, e.g., consisting of, SEQ ID NO: 315 and SEQ ID NO: 319, respectively. In an aspect, the first gRNA molecule and the second gRNA molecule include targeting domains comprising, e.g., consisting of, SEQ ID NO: 315 and SEQ ID NO: 298, respectively. In an aspect, the first gRNA molecule and the second gRNA molecule include targeting domains comprising, e.g., consisting of, SEQ ID NO: 315 and SEQ ID NO: 322, respectively. In an aspect, the first gRNA molecule and the second gRNA molecule include targeting domains comprising, e.g., consisting of, SEQ ID NO: 315 and SEQ ID NO: 311, respectively. In an aspect, the first gRNA molecule and the second gRNA molecule include targeting domains comprising, e.g., consisting of, SEQ ID NO: 315 and SEQ ID NO: 290, respectively. In an aspect, the first gRNA molecule and the second gRNA molecule include targeting domains comprising, e.g., consisting of, SEQ ID NO: 315 and SEQ ID NO: 317, respectively. In an aspect, the first gRNA molecule and the second gRNA molecule include targeting domains comprising, e.g., consisting of, SEQ ID NO: 315 and SEQ ID NO: 309, respectively. In an aspect, the first gRNA molecule and the second gRNA molecule include targeting domains comprising, e.g., consisting of, SEQ ID NO: 315 and SEQ ID NO: 289, respectively. In an aspect, the first gRNA molecule and the second gRNA molecule include targeting domains comprising, e.g., consisting of, SEQ ID NO: 315 and SEQ ID NO: 281, respectively. In an aspect, the first gRNA molecule and the second gRNA molecule include targeting domains comprising, e.g., consisting of, SEQ ID NO: 290 and SEQ ID NO: 312, respectively. In an aspect, the first gRNA molecule and the second gRNA molecule include targeting domains comprising, e.g., consisting of, SEQ ID NO: 290 and SEQ ID NO: 313, respectively. In an aspect, the first gRNA molecule and the second gRNA molecule include targeting domains comprising, e.g., consisting of, SEQ ID NO: 290 and SEQ ID NO: 294, respectively. In an aspect, the first gRNA molecule and the second gRNA molecule include targeting domains comprising, e.g., consisting of, SEQ ID NO: 290 and SEQ ID NO: 310, respectively. In an aspect, the first gRNA molecule and the second gRNA molecule include targeting domains comprising, e.g., consisting of, SEQ ID NO: 290 and SEQ ID NO: 319, respectively. In an aspect, the first gRNA molecule and the second gRNA molecule include targeting domains comprising, e.g., consisting of, SEQ ID NO: 290 and SEQ ID NO: 298, respectively. In an aspect, the first gRNA molecule and the second gRNA molecule include targeting domains comprising, e.g., consisting of, SEQ ID NO: 290 and SEQ ID NO: 322, respectively. In an aspect, the first gRNA molecule and the second gRNA molecule include targeting domains comprising, e.g., consisting of, SEQ ID NO: 290 and SEQ ID NO: 311, respectively. In an aspect, the first gRNA molecule and the second gRNA molecule include targeting domains comprising, e.g., consisting of, SEQ ID NO: 290 and SEQ ID NO: 315, respectively. In an aspect, the first gRNA molecule and the second gRNA molecule include targeting domains comprising, e.g., consisting of, SEQ ID NO: 290 and SEQ ID NO: 317, respectively. In an aspect, the first gRNA molecule and the second gRNA molecule include targeting domains comprising, e.g., consisting of, SEQ ID NO: 290 and SEQ ID NO: 309, respectively. In an aspect, the first gRNA molecule and the second gRNA molecule include targeting domains comprising, e.g., consisting of, SEQ ID NO: 290 and SEQ ID NO: 289, respectively. In an aspect, the first gRNA molecule and the second gRNA molecule include targeting domains comprising, e.g., consisting of, SEQ ID NO: 290 and SEQ ID NO: 281, respectively. In an aspect, the first gRNA molecule and the second gRNA molecule include targeting domains comprising, e.g., consisting of, SEQ ID NO: 317 and SEQ ID NO: 312, respectively. In an aspect, the first gRNA molecule and the second gRNA molecule include targeting domains comprising, e.g., consisting of, SEQ ID NO: 317 and SEQ ID NO: 313, respectively. In an aspect, the first gRNA molecule and the second gRNA molecule include targeting domains comprising, e.g., consisting of, SEQ ID NO: 317 and SEQ ID NO: 294, respectively. In an aspect, the first gRNA molecule and the second gRNA molecule include targeting domains comprising, e.g., consisting of, SEQ ID NO: 317 and SEQ ID NO: 310, respectively. In an aspect, the first gRNA molecule and the second gRNA molecule include targeting domains comprising, e.g., consisting of, SEQ ID NO: 317 and SEQ ID NO: 319, respectively. In an aspect, the first gRNA molecule and the second gRNA molecule include targeting domains comprising, e.g., consisting of, SEQ ID NO: 317 and SEQ ID NO: 298, respectively. In an aspect, the first gRNA molecule and the second gRNA molecule include targeting domains comprising, e.g., consisting of, SEQ ID NO: 317 and SEQ ID NO: 322, respectively. In an aspect, the first gRNA molecule and the second gRNA molecule include targeting domains comprising, e.g., consisting of, SEQ ID NO: 317 and SEQ ID NO: 311, respectively. In an aspect, the first gRNA molecule and the second gRNA molecule include targeting domains comprising, e.g., consisting of, SEQ ID NO: 317 and SEQ ID NO: 315, respectively. In an aspect, the first gRNA molecule and the second gRNA molecule include targeting domains comprising, e.g., consisting of, SEQ ID NO: 317 and SEQ ID NO: 290, respectively. In an aspect, the first gRNA molecule and the second gRNA molecule include targeting domains comprising, e.g., consisting of, SEQ ID NO: 317 and SEQ ID NO: 309, respectively. In an aspect, the first gRNA molecule and the second gRNA molecule include targeting domains comprising, e.g., consisting of, SEQ ID NO: 317 and SEQ ID NO: 289, respectively. In an aspect, the first gRNA molecule and the second gRNA molecule include targeting domains comprising, e.g., consisting of, SEQ ID NO: 317 and SEQ ID NO: 281, respectively. In an aspect, the first gRNA molecule and the second gRNA molecule include targeting domains comprising, e.g., consisting of, SEQ ID NO: 309 and SEQ ID NO: 312, respectively. In an aspect, the first gRNA molecule and the second gRNA molecule include targeting domains comprising, e.g., consisting of, SEQ ID NO: 309 and SEQ ID NO: 313, respectively. In an aspect, the first gRNA molecule and the second gRNA molecule include targeting domains comprising, e.g., consisting of, SEQ ID NO: 309 and SEQ ID NO: 294, respectively. In an aspect, the first gRNA molecule and the second gRNA molecule include targeting domains comprising, e.g., consisting of, SEQ ID NO: 309 and SEQ ID NO: 310, respectively. In an aspect, the first gRNA molecule and the second gRNA molecule include targeting domains comprising, e.g., consisting of, SEQ ID NO: 309 and SEQ ID NO: 319, respectively. In an aspect, the first gRNA molecule and the second gRNA molecule include targeting domains comprising, e.g., consisting of, SEQ ID NO: 309 and SEQ ID NO: 298, respectively. In an aspect, the first gRNA molecule and the second gRNA molecule include targeting domains comprising, e.g., consisting of, SEQ ID NO: 309 and SEQ ID NO: 322, respectively. In an aspect, the first gRNA molecule and the second gRNA molecule include targeting domains comprising, e.g., consisting of, SEQ ID NO: 309 and SEQ ID NO: 311, respectively. In an aspect, the first gRNA molecule and the second gRNA molecule include targeting domains comprising, e.g., consisting of, SEQ ID NO: 309 and SEQ ID NO: 315, respectively. In an aspect, the first gRNA molecule and the second gRNA molecule include targeting domains comprising, e.g., consisting of, SEQ ID NO: 309 and SEQ ID NO: 290, respectively. In an aspect, the first gRNA molecule and the second gRNA molecule include targeting domains comprising, e.g., consisting of, SEQ ID NO: 309 and SEQ ID NO: 317, respectively. In an aspect, the first gRNA molecule and the second gRNA molecule include targeting domains comprising, e.g., consisting of, SEQ ID NO: 309 and SEQ ID NO: 289, respectively. In an aspect, the first gRNA molecule and the second gRNA molecule include targeting domains comprising, e.g., consisting of, SEQ ID NO: 309 and SEQ ID NO: 281, respectively.

[0474] In an aspect, the first gRNA molecule and the second gRNA molecule include targeting domains comprising, e.g., consisting of, SEQ ID NO: 289 and SEQ ID NO: 312, respectively. In an aspect, the first gRNA molecule and the second gRNA molecule include targeting domains comprising, e.g., consisting of, SEQ ID NO: 289 and SEQ ID NO: 313, respectively. In an aspect, the first gRNA molecule and the second gRNA molecule include targeting domains comprising, e.g., consisting of, SEQ ID NO: 289 and SEQ ID NO: 294, respectively. In an aspect, the first gRNA molecule and the second gRNA molecule include targeting domains comprising, e.g., consisting of, SEQ ID NO: 289 and SEQ ID NO: 310, respectively. In an aspect, the first gRNA molecule and the second gRNA molecule include targeting domains comprising, e.g., consisting of, SEQ ID NO: 289 and SEQ ID NO: 319, respectively.

[0475] In an aspect, the first gRNA molecule and the second gRNA molecule include targeting domains comprising, e.g., consisting of, SEQ ID NO: 289 and SEQ ID NO: 298, respectively. In an aspect, the first gRNA molecule and the second gRNA molecule include targeting domains comprising, e.g., consisting of, SEQ ID NO: 289 and SEQ ID NO: 322, respectively. In an aspect, the first gRNA molecule and the second gRNA molecule include targeting domains comprising, e.g., consisting of, SEQ ID NO: 289 and SEQ ID NO: 311, respectively. In an aspect, the first gRNA molecule and the second gRNA molecule include targeting domains comprising, e.g., consisting of, SEQ ID NO: 289 and SEQ ID NO: 315, respectively. In an aspect, the first gRNA molecule and the second gRNA molecule include targeting domains comprising, e.g., consisting of, SEQ ID NO: 289 and SEQ ID NO: 290, respectively. In an aspect, the first gRNA molecule and the second gRNA molecule include targeting domains comprising, e.g., consisting of, SEQ ID NO: 289 and SEQ ID NO: 317, respectively. In an aspect, the first gRNA molecule and the second gRNA molecule include targeting domains comprising, e.g., consisting of, SEQ ID NO: 289 and SEQ ID NO: 309, respectively. In an aspect, the first gRNA molecule and the second gRNA molecule include targeting domains comprising, e.g., consisting of, SEQ ID NO: 289 and SEQ ID NO: 281, respectively. In an aspect, the first gRNA molecule and the second gRNA molecule include targeting domains comprising, e.g., consisting of, SEQ ID NO: 281 and SEQ ID NO: 312, respectively. In an aspect, the first gRNA molecule and the second gRNA molecule include targeting domains comprising, e.g., consisting of, SEQ ID NO: 281 and SEQ ID NO: 313, respectively. In an aspect, the first gRNA molecule and the second gRNA molecule include targeting domains comprising, e.g., consisting of, SEQ ID NO: 281 and SEQ ID NO: 294, respectively. In an aspect, the first gRNA molecule and the second gRNA molecule include targeting domains comprising, e.g., consisting of, SEQ ID NO: 281 and SEQ ID NO: 310, respectively. In an aspect, the first gRNA molecule and the second gRNA molecule include targeting domains comprising, e.g., consisting of, SEQ ID NO: 281 and SEQ ID NO: 319, respectively. In an aspect, the first gRNA molecule and the second gRNA molecule include targeting domains comprising, e.g., consisting of, SEQ ID NO: 281 and SEQ ID NO: 298, respectively. In an aspect, the first gRNA molecule and the second gRNA molecule include targeting domains comprising, e.g., consisting of, SEQ ID NO: 281 and SEQ ID NO: 322, respectively. In an aspect, the first gRNA molecule and the second gRNA molecule include targeting domains comprising, e.g., consisting of, SEQ ID NO: 281 and SEQ ID NO: 311, respectively. In an aspect, the first gRNA molecule and the second gRNA molecule include targeting domains comprising, e.g., consisting of, SEQ ID NO: 281 and SEQ ID NO: 315, respectively. In an aspect, the first gRNA molecule and the second gRNA molecule include targeting domains comprising, e.g., consisting of, SEQ ID NO: 281 and SEQ ID NO: 290, respectively. In an aspect, the first gRNA molecule and the second gRNA molecule include targeting domains comprising, e.g., consisting of, SEQ ID NO: 281 and SEQ ID NO: 317, respectively. In an aspect, the first gRNA molecule and the second gRNA molecule include targeting domains comprising, e.g., consisting of, SEQ ID NO: 281 and SEQ ID NO: 309, respectively. In an aspect, the first gRNA molecule and the second gRNA molecule include targeting domains comprising, e.g., consisting of, SEQ ID NO: 281 and SEQ ID NO: 289, respectively.

TABLE 9
Preferred Guide RNA Targeting Domains directed to the +55
Enhancer Region of the BCL11a Gene (i.e., to a BCL11a Enhancer)

| | | | | | SEQ ID |
|---|---|---|---|---|---|
| ID | Species | Strand | Location | Targeting Domain Sequence | NO: |
| CR002142 | h | + | Chr2: 60498031-60498053 | CCUGGCAGACCCUCAAGAGC | 1596 |
| CR002143 | h | − | Chr2: 60498031-60498053 | CCUGGCAGACCCUCAAGAGC | 1597 |
| CR002144 | h | + | Chr2: 60498032-60498054 | CUGGCAGACCCUCAAGAGCA | 1598 |
| CR002145 | h | + | Chr2: 60498033-60498055 | UGGCAGACCCUCAAGAGCAG | 1599 |
| CR002146 | h | − | Chr2: 60498040-60498062 | CCCUCAAGAGCAGGGGUCUU | 1600 |
| CR002147 | h | − | Chr2: 60498041-60498063 | CCUCAAGAGCAGGGGUCUUC | 1601 |
| CR001262 | h | + | Chr1: 55039155-55039177 | UAAGGCCAGUGGAAAGAAUU | 1602 |
| CR002148 | h | + | Chr2: 60498045-60498067 | AAGAGCAGGGGUCUUCUCUU | 1603 |
| CR002149 | h | + | Chr2: 60498046-60498068 | AGAGCAGGGGUCUUCUCUUU | 1604 |
| CR002150 | h | + | Chr2: 60498047-60498069 | GAGCAGGGGUCUUCUCUUUG | 1605 |
| CR002151 | h | + | Chr2: 60498048-60498070 | AGCAGGGGUCUUCUCUUUGG | 1606 |
| CR002152 | h | + | Chr2: 60498051-60498073 | AGGGGUCUUCUCUUUGGGGG | 1607 |
| CR002153 | h | + | Chr2: 60498068-60498090 | GGGAGGACAUCACUCUUAGC | 1608 |
| CR002154 | h | + | Chr2: 60498069-60498091 | GGAGGACAUCACUCUUAGCA | 1609 |
| CR001261 | h | − | Chr1: 55039269-55039291 | GCCAGACUCCAAGUUCUGCC | 1610 |
| CR002155 | h | + | Chr2: 60498073-60498095 | GACAUCACUCUUAGCAGGGC | 1611 |
| CR002156 | h | + | Chr2: 60498074-60498096 | ACAUCACUCUUAGCAGGGCU | 1612 |
| CR002157 | h | + | Chr2: 60498075-60498097 | CAUCACUCUUAGCAGGGCUG | 1613 |
| CR002158 | h | + | Chr2: 60498091-60498113 | GCUGGGGUGAGUCAAAAGUC | 1614 |
| CR002159 | h | + | Chr2: 60498092-60498114 | CUGGGGUGAGUCAAAAGUCU | 1615 |
| CR002160 | h | + | Chr2: 60498099-60498121 | GAGUCAAAAGUCUGGGAGAA | 1616 |
| CR002161 | h | + | Chr2: 60498102-60498124 | UCAAAAGUCUGGGAGAAUGG | 1617 |
| CR002162 | h | + | Chr2: 60498107-60498129 | AGUCUGGGAGAAUGGAGGUG | 1618 |
| CR002163 | h | + | Chr2: 60498110-60498132 | CUGGGAGAAUGGAGGUGUGG | 1619 |
| CR002164 | h | + | Chr2: 60498111-60498133 | UGGGAGAAUGGAGGUGUGGA | 1620 |
| CR002165 | h | + | Chr2: 60498112-60498134 | GGGAGAAUGGAGGUGUGGAG | 1621 |
| CR002166 | h | + | Chr2: 60498120-60498142 | GGAGGUGUGGAGGGGAUAAC | 1622 |
| CR001263 | h | + | Chr1: 55039180-55039202 | GGCAGCGAGGAGUCCACAGU | 1623 |
| CR002167 | h | + | Chr2: 60498121-60498143 | GAGGUGUGGAGGGGAUAACU | 1624 |
| CR002168 | h | + | Chr2: 60498137-60498159 | AACUGGGUCAGACCCCAAGC | 1625 |
| CR002169 | h | + | Chr2: 60498141-60498163 | GGGUCAGACCCCAAGCAGGA | 1626 |
| CR002170 | h | + | Chr2: 60498142-60498164 | GGUCAGACCCCAAGCAGGAA | 1627 |
| CR002171 | h | − | Chr2: 60498149-60498171 | CCCCAAGCAGGAAGGGCCUC | 1628 |
| CR002172 | h | − | Chr2: 60498150-60498172 | CCCAAGCAGGAAGGGCCUCU | 1629 |
| CR002173 | h | − | Chr2: 60498151-60498173 | CCAAGCAGGAAGGGCCUCUA | 1630 |
| CR002174 | h | + | Chr2: 60498157-60498179 | AGGAAGGGCCUCUAUGUAGA | 1631 |
| CR002175 | h | + | Chr2: 60498158-60498180 | GGAAGGGCCUCUAUGUAGAC | 1632 |
| CR002176 | h | + | Chr2: 60498165-60498187 | CCUCUAUGUAGACGGGUGUG | 1633 |
| CR002177 | h | − | Chr2: 60498165-60498187 | CCUCUAUGUAGACGGGUGUG | 1634 |
| CR002178 | h | + | Chr2: 60498175-60498197 | GACGGGUGUGUGGCUCCUUA | 1635 |
| CR002179 | h | − | Chr2: 60498190-60498212 | CCUUAAGGUGACCCAGCAGC | 1636 |
| CR002180 | h | + | Chr2: 60498192-60498214 | UUAAGGUGACCCAGCAGCCC | 1637 |
| CR002181 | h | + | Chr2: 60498193-60498215 | UAAGGUGACCCAGCAGCCCU | 1638 |
| CR002182 | h | − | Chr2: 60498201-60498223 | CCCAGCAGCCCUGGGCACAG | 1639 |
| CR002183 | h | − | Chr2: 60498202-60498224 | CCAGCAGCCCUGGGCACAGA | 1640 |
| CR001261 | h | − | Chr1: 55039269-55039291 | GCCAGACUCCAAGUUCUGCC | 1641 |
| CR002184 | h | + | Chr2: 60498204-60498226 | AGCAGCCCUGGGCACAGAAG | 1642 |
| CR002185 | h | − | Chr2: 60498209-60498231 | CCCUGGGCACAGAAGUGGUG | 1643 |
| CR002186 | h | − | Chr2: 60498210-60498232 | CCUGGGCACAGAAGUGGUGC | 1644 |
| CR002187 | h | + | Chr2: 60498211-60498233 | CUGGGCACAGAAGUGGUGCG | 1645 |
| CR002188 | h | + | Chr2: 60498240-60498262 | UGCCAACAGUGAUAACCAGC | 1646 |
| CR002189 | h | + | Chr2: 60498241-60498263 | GCCAACAGUGAUAACCAGCA | 1647 |
| CR001262 | h | + | Chr1: 55039155-55039177 | UAAGGCCAGUGGAAAGAAUU | 1648 |
| CR002190 | h | − | Chr2: 60498242-60498264 | CCAACAGUGAUAACCAGCAG | 1649 |
| CR002191 | h | + | Chr2: 60498255-60498277 | CCAGCAGGGCCUGUCAGAAG | 1650 |
| CR002192 | h | − | Chr2: 60498255-60498277 | CCAGCAGGGCCUGUCAGAAG | 1651 |
| CR002193 | h | + | Chr2: 60498261-60498283 | GGGCCUGUCAGAAGAGGCCC | 1652 |
| CR002194 | h | − | Chr2: 60498264-60498286 | CCUGUCAGAAGAGGCCCUGG | 1653 |
| CR002195 | h | + | Chr2: 60498271-60498293 | GAAGAGGCCCUGGACACUGA | 1654 |
| CR002196 | h | + | Chr2: 60498275-60498297 | AGGCCCUGGACACUGAAGGC | 1655 |
| CR002197 | h | + | Chr2: 60498276-60498298 | GGCCCUGGACACUGAAGGCU | 1656 |
| CR001264 | h | − | Chr1: 55039149-55039171 | UCUUUCCACUGGCCUUAACC | 1657 |
| CR002198 | h | − | Chr2: 60498278-60498300 | CCCUGGACACUGAAGGCUGG | 1658 |
| CR002199 | h | − | Chr2: 60498279-60498301 | CCUGGACACUGAAGGCUGGG | 1659 |
| CR002200 | h | + | Chr2: 60498287-60498309 | CUGAAGGCUGGGCACAGCCU | 1660 |
| CR002201 | h | + | Chr2: 60498288-60498310 | UGAAGGCUGGGCACAGCCUU | 1661 |
| CR002202 | h | + | Chr2: 60498289-60498311 | GAAGGCUGGGCACAGCCUUG | 1662 |
| CR002203 | h | + | Chr2: 60498301-60498323 | CAGCCUUGGGGACCGCUCAC | 1663 |
| CR002204 | h | − | Chr2: 60498304-60498326 | CCUUGGGGACCGCUCACAGG | 1664 |
| CR002205 | h | − | Chr2: 60498313-60498335 | CCGCUCACAGGACAUGCAGC | 1665 |
| CR002206 | h | − | Chr2: 60498341-60498363 | CCGACAACUCCCUACCGCGA | 1666 |
| CR002207 | h | − | Chr2: 60498350-60498372 | CCCUACCGCGACCCCUAUCA | 1667 |
| CR002208 | h | − | Chr2: 60498351-60498373 | CCUACCGCGACCCCUAUCAG | 1668 |
| CR002209 | h | − | Chr2: 60498355-60498377 | CCGCGACCCCUAUCAGUGCC | 1669 |
| CR002210 | h | − | Chr2: 60498361-60498383 | CCCCUAUCAGUGCCGACCAA | 1670 |
| CR002211 | h | − | Chr2: 60498362-60498384 | CCCUAUCAGUGCCGACCAAG | 1671 |
| CR002212 | h | − | Chr2: 60498363-60498385 | CCUAUCAGUGCCGACCAAGC | 1672 |
| CR002213 | h | − | Chr2: 60498373-60498395 | CCGACCAAGCACACAAGAUG | 1673 |
| CR002214 | h | − | Chr2: 60498377-60498399 | CCAAGCACACAAGAUGCACA | 1674 |
| CR002215 | h | + | Chr2: 60498380-60498402 | AGCACACAAGAUGCACACCC | 1675 |
| CR002216 | h | + | Chr2: 60498384-60498406 | CACAAGAUGCACACCCAGGC | 1676 |
| CR002217 | h | + | Chr2: 60498385-60498407 | ACAAGAUGCACACCCAGGCU | 1677 |
| CR001264 | h | − | Chr1: 55039149-55039171 | UCUUUCCACUGGCCUUAACC | 1678 |
| CR002218 | h | + | Chr2: 60498389-60498411 | GAUGCACACCCAGGCUGGGC | 1679 |
| CR002219 | h | + | Chr2: 60498396-60498418 | ACCCAGGCUGGGCUGGACAG | 1680 |
| CR002220 | h | + | Chr2: 60498397-60498419 | CCCAGGCUGGGCUGGACAGA | 1681 |
| CR002221 | h | − | Chr2: 60498397-60498419 | CCCAGGCUGGGCUGGACAGA | 1682 |
| CR002222 | h | + | Chr2: 60498398-60498420 | CCAGGCUGGGCUGGACAGAG | 1683 |
| CR002223 | h | − | Chr2: 60498398-60498420 | CCAGGCUGGGCUGGACAGAG | 1684 |
| CR002224 | h | + | Chr2: 60498415-60498437 | GAGGGGUCCCACAAGAUCAC | 1685 |
| CR002225 | h | + | Chr2: 60498416-60498438 | AGGGGUCCCACAAGAUCACA | 1686 |
| CR002226 | h | − | Chr2: 60498422-60498444 | CCCACAAGAUCACAGGGUGU | 1687 |
| CR001263 | h | + | Chr1: 55039180-55039202 | GGCAGCGAGGAGUCCACAGU | 1688 |
| CR002227 | h | − | Chr2: 60498423-60498445 | CCACAAGAUCACAGGGUGUG | 1689 |
| CR002228 | h | + | Chr2: 60498431-60498453 | UCACAGGGUGUGCCCUGAGA | 1690 |
| CR002229 | h | + | Chr2: 60498434-60498456 | CAGGGUGUGCCCUGAGAAGG | 1691 |

[0476] In some aspects of the invention, it is preferred that the gRNA molecule to the +55 Enhancer region of BCL11a comprise a targeting domain comprising, e.g., consisting of a targeting domain sequence selected from SEQ ID NO: 1683, SEQ ID NO: 1638, SEQ ID NO: 1647, SEQ ID NO: 1609, SEQ ID NO: 1621, SEQ ID NO: 1617, SEQ ID NO: 1654, SEQ ID NO: 1631, SEQ ID NO: 1620, SEQ ID NO: 1637, SEQ ID NO: 1612, SEQ ID NO: 1656, SEQ ID NO: 1619, SEQ ID NO: 1675, SEQ ID NO: 1645, SEQ ID NO: 1598, SEQ ID NO: 1599, SEQ ID NO: 1663, SEQ ID NO: 1677, and SEQ ID NO: 1626.

[0477] In some aspects of the invention, e.g., as indicated herein, it may be beneficial to include gRNA moleucles targeting more than one, e.g., two, target sites (e.g., a first gRNA molecule and a second gRNA molecule). In some embodiments, the two target sites are both located in the +55 BCL11a enhancer region. In such aspects, any combination of more than one, e.g., two, gRNA molecules (e.g., a first gRNA molecule and a second gRNA molecule) comprising, e.g., consisting of, targeting domains listed in Table 9 may be used, that target different target sites of the +55 BCL11a enhancer region. In an aspect, the first gRNA molecule and the second gRNA molecule include targeting domains comprising, e.g., consisting of, SEQ ID NO: 1683 and SEQ ID NO: 1638, respectively. In an aspect, the first gRNA molecule and the second gRNA molecule include targeting domains comprising, e.g., consisting of, SEQ ID NO: 1683 and SEQ ID NO: 1647, respectively. In an aspect, the first gRNA molecule and the second gRNA molecule include targeting domains comprising, e.g., consisting of, SEQ ID NO: 1683 and SEQ ID NO: 1609, respectively. In an aspect, the first gRNA molecule and the second gRNA molecule include targeting domains comprising, e.g., consisting of, SEQ ID NO: 1683 and SEQ ID NO: 1621, respectively. In an aspect, the first gRNA molecule and the second gRNA molecule include targeting domains comprising, e.g., consisting of, SEQ ID NO: 1683 and SEQ ID NO: 1617, respectively. In an aspect, the first gRNA molecule and the second gRNA molecule include targeting domains comprising, e.g., consisting of, SEQ ID NO: 1683 and SEQ ID NO: 1654, respectively. In an aspect, the first gRNA molecule and the second gRNA molecule include targeting domains comprising, e.g., consisting of, SEQ ID NO: 1683 and SEQ ID NO: 1631, respectively. In an aspect, the first gRNA molecule and the second gRNA molecule include targeting domains comprising, e.g., consisting of, SEQ ID NO: 1683 and SEQ ID NO: 1620, respectively. In an aspect, the first gRNA molecule and the second gRNA molecule include targeting domains comprising, e.g., consisting of, SEQ ID NO: 1683 and SEQ ID NO: 1637, respectively. In an aspect, the first gRNA molecule and the second gRNA molecule include targeting domains comprising, e.g., consisting of, SEQ ID NO: 1683 and SEQ ID NO: 1612, respectively. In an aspect, the first gRNA molecule and the second gRNA molecule include targeting domains comprising, e.g., consisting of, SEQ ID NO: 1683 and SEQ ID NO: 1656, respectively. In an aspect, the first gRNA molecule and the second gRNA molecule include targeting domains comprising, e.g., consisting of, SEQ ID NO: 1683 and SEQ ID NO: 1619, respectively. In an aspect, the first gRNA molecule and the second gRNA molecule include targeting domains comprising, e.g., consisting of, SEQ ID NO: 1683 and SEQ ID NO: 1675, respectively. In an aspect, the first gRNA molecule and the second gRNA molecule include targeting domains comprising, e.g., consisting of, SEQ ID NO: 1683 and SEQ ID NO: 1645, respectively. In an aspect, the first gRNA molecule and the second gRNA molecule include targeting domains comprising, e.g., consisting of, SEQ ID NO: 1683 and SEQ ID NO: 1598, respectively. In an aspect, the first gRNA molecule and the second gRNA molecule include targeting domains comprising, e.g., consisting of, SEQ ID NO: 1683 and SEQ ID NO: 1599, respectively. In an aspect, the first gRNA molecule and the second gRNA molecule include targeting domains comprising, e.g., consisting of, SEQ ID NO: 1683 and SEQ ID NO: 1663, respectively. In an aspect, the first gRNA molecule and the second gRNA molecule include targeting domains comprising, e.g., consisting of, SEQ ID NO: 1683 and SEQ ID NO: 1677, respectively. In an aspect, the first gRNA molecule and the second gRNA molecule include targeting domains comprising, e.g., consisting of, SEQ ID NO: 1683 and SEQ ID NO: 1626, respectively. In an aspect, the first gRNA molecule and the second gRNA molecule include targeting domains comprising, e.g., consisting of, SEQ ID NO: 1638 and SEQ ID NO: 1647, respectively. In an aspect, the first gRNA molecule and the second gRNA molecule include targeting domains comprising, e.g., consisting of, SEQ ID NO: 1638 and SEQ ID NO: 1609, respectively. In an aspect, the first gRNA molecule and the second gRNA molecule include targeting domains comprising, e.g., consisting of, SEQ ID NO: 1638 and SEQ ID NO: 1621, respectively. In an aspect, the first gRNA molecule and the second gRNA molecule include targeting domains comprising, e.g., consisting of, SEQ ID NO: 1638 and SEQ ID NO: 1617, respectively. In an aspect, the first gRNA molecule and the second gRNA molecule include targeting domains comprising, e.g., consisting of, SEQ ID NO: 1638 and SEQ ID NO: 1654, respectively. In an aspect, the first gRNA molecule and the second gRNA molecule include targeting domains comprising, e.g., consisting of, SEQ ID NO: 1638 and SEQ ID NO: 1631, respectively. In an aspect, the first gRNA molecule and the second gRNA molecule include targeting domains comprising, e.g., consisting of, SEQ ID NO: 1638 and SEQ ID NO: 1620, respectively. In an aspect, the first gRNA molecule and the second gRNA molecule include targeting domains comprising, e.g., consisting of, SEQ ID NO: 1638 and SEQ ID NO: 1637, respectively. In an aspect, the first gRNA molecule and the second gRNA molecule include targeting domains comprising, e.g., consisting of, SEQ ID NO: 1638 and SEQ ID NO: 1612, respectively. In an aspect, the first gRNA molecule and the second gRNA molecule include targeting domains comprising, e.g., consisting of, SEQ ID NO: 1638 and SEQ ID NO: 1656, respectively. In an aspect, the first gRNA molecule and the second gRNA molecule include targeting domains comprising, e.g., consisting of, SEQ ID NO: 1638 and SEQ ID NO: 1619, respectively. In an aspect, the first gRNA molecule and the second gRNA molecule include targeting domains comprising, e.g., consisting of, SEQ ID NO: 1638 and SEQ ID NO: 1675, respectively. In an aspect, the first gRNA molecule and the second gRNA molecule include targeting domains comprising, e.g., consisting of, SEQ ID NO: 1638 and SEQ ID NO: 1645, respectively. In an aspect, the first gRNA molecule and the second gRNA molecule include targeting domains comprising, e.g., consisting of, SEQ ID NO: 1638 and SEQ ID NO: 1598, respectively. In an aspect, the first gRNA molecule and the second gRNA molecule include targeting domains comprising, e.g., consisting of, SEQ ID NO: 1638 and SEQ ID NO: 1599, respectively. In an aspect, the first gRNA molecule and the second gRNA molecule include targeting domains comprising, e.g., consisting of, SEQ ID NO: 1638 and SEQ ID NO: 1663, respectively. In an aspect, the first gRNA molecule and the second gRNA molecule include targeting domains comprising, e.g., consisting of, SEQ ID NO: 1638 and SEQ ID NO: 1677, respectively. In an aspect, the first gRNA molecule and the second gRNA molecule include targeting domains comprising, e.g., consisting of, SEQ ID NO: 1638 and SEQ ID NO: 1626, respectively. In an aspect, the first gRNA molecule and the second gRNA molecule include targeting domains comprising, e.g., consisting of, SEQ ID NO: 1647 and SEQ ID NO: 1638, respectively. In an aspect, the first gRNA molecule and the second gRNA molecule include targeting domains comprising, e.g., consisting of, SEQ ID NO: 1647 and SEQ ID NO: 1609, respectively. In an aspect, the first gRNA molecule and the second gRNA molecule include targeting domains comprising, e.g., consisting of, SEQ ID NO: 1647 and SEQ ID NO: 1621, respectively. In an aspect, the first gRNA molecule and the second gRNA molecule include targeting domains comprising, e.g., consisting of, SEQ ID NO: 1647 and SEQ ID NO: 1617, respectively. In an aspect, the first gRNA molecule and the second gRNA molecule include targeting domains comprising, e.g., consisting of, SEQ ID NO: 1647 and SEQ ID NO: 1654, respectively. In an aspect, the first gRNA molecule and the second gRNA molecule include targeting domains comprising, e.g., consisting of, SEQ ID NO: 1647 and SEQ ID NO: 1631, respectively. In an aspect, the first gRNA molecule and the second gRNA molecule include targeting domains comprising, e.g., consisting of, SEQ ID NO: 1647 and SEQ ID NO: 1620, respectively. In an aspect, the first gRNA molecule and the second gRNA molecule include targeting domains comprising, e.g., consisting of, SEQ ID NO: 1647 and SEQ ID NO: 1637, respectively. In an aspect, the first gRNA molecule and the second gRNA molecule include targeting domains comprising, e.g., consisting of, SEQ ID NO: 1647 and SEQ ID NO: 1612, respectively. In an aspect, the first gRNA molecule and the second gRNA molecule include targeting domains comprising, e.g., consisting of, SEQ ID NO: 1647 and SEQ ID NO: 1656, respectively. In an aspect, the first gRNA molecule and the second gRNA molecule include targeting domains comprising, e.g., consisting of, SEQ ID NO: 1647 and SEQ ID NO: 1619, respectively. In an aspect, the first gRNA molecule and the second gRNA molecule include targeting domains comprising, e.g., consisting of, SEQ ID NO: 1647 and SEQ ID NO: 1675, respectively. In an aspect, the first gRNA molecule and the second gRNA molecule include targeting domains comprising, e.g., consisting of, SEQ ID NO: 1647 and SEQ ID NO: 1645, respectively. In an aspect, the first gRNA molecule and the second gRNA molecule include targeting domains comprising, e.g., consisting of, SEQ ID NO: 1647 and SEQ ID NO: 1598, respectively. In an aspect, the first gRNA molecule and the second gRNA molecule include targeting domains comprising, e.g., consisting of, SEQ ID NO: 1647 and SEQ ID NO: 1599, respectively. In an aspect, the first gRNA molecule and the second gRNA molecule include targeting domains comprising, e.g., consisting of, SEQ ID NO: 1647 and SEQ ID NO: 1663, respectively. In an aspect, the first gRNA molecule and the second gRNA molecule include targeting domains comprising, e.g., consisting of, SEQ ID NO: 1647 and SEQ ID NO: 1677, respectively. In an aspect, the first gRNA molecule and the second gRNA molecule include targeting domains comprising, e.g., consisting of, SEQ ID NO: 1647 and SEQ ID NO: 1626, respectively. In an aspect, the first gRNA molecule and the second gRNA molecule include targeting domains comprising, e.g., consisting of, SEQ ID NO: 1609 and SEQ ID NO: 1638, respectively. In an aspect, the first gRNA molecule and the second gRNA molecule include targeting domains comprising, e.g., consisting of, SEQ ID NO: 1609 and SEQ ID NO: 1647, respectively. In an aspect, the first gRNA molecule and the second gRNA molecule include targeting domains comprising, e.g., consisting of, SEQ ID NO: 1609 and SEQ ID NO: 1621, respectively. In an aspect, the first gRNA molecule and the second gRNA molecule include targeting domains comprising, e.g., consisting of, SEQ ID NO: 1609 and SEQ ID NO: 1617, respectively. In an aspect, the first gRNA molecule and the second gRNA molecule include targeting domains comprising, e.g., consisting of, SEQ ID NO: 1609 and SEQ ID NO: 1654, respectively. In an aspect, the first gRNA molecule and the second gRNA molecule include targeting domains comprising, e.g., consisting of, SEQ ID NO: 1609 and SEQ ID NO: 1631, respectively. In an aspect, the first gRNA molecule and the second gRNA molecule include targeting domains comprising, e.g., consisting of, SEQ ID NO: 1609 and SEQ ID NO: 1620, respectively. In an aspect, the first gRNA molecule and the second gRNA molecule include targeting domains comprising, e.g., consisting of, SEQ ID NO: 1609 and SEQ ID NO: 1637, respectively. In an aspect, the first gRNA molecule and the second gRNA molecule include targeting domains comprising, e.g., consisting of, SEQ ID NO: 1609 and SEQ ID NO: 1612, respectively. In an aspect, the first gRNA molecule and the second gRNA molecule include targeting domains comprising, e.g., consisting of, SEQ ID NO: 1609 and SEQ ID NO: 1656, respectively. In an aspect, the first gRNA molecule and the second gRNA molecule include targeting domains comprising, e.g., consisting of, SEQ ID NO: 1609 and SEQ ID NO: 1619, respectively. In an aspect, the first gRNA molecule and the second gRNA molecule include targeting domains comprising, e.g., consisting of, SEQ ID NO: 1609 and SEQ ID NO: 1675, respectively. In an aspect, the first gRNA molecule and the second gRNA molecule include targeting domains comprising, e.g., consisting of, SEQ ID NO: 1609 and SEQ ID NO: 1645, respectively. In an aspect, the first gRNA molecule and the second gRNA molecule include targeting domains comprising, e.g., consisting of, SEQ ID NO: 1609 and SEQ ID NO: 1598, respectively. In an aspect, the first gRNA molecule and the second gRNA molecule include targeting domains comprising, e.g., consisting of, SEQ ID NO: 1609 and SEQ ID NO: 1599, respectively. In an aspect, the first gRNA molecule and the second gRNA molecule include targeting domains comprising, e.g., consisting of, SEQ ID NO: 1609 and SEQ ID NO: 1663, respectively. In an aspect, the first gRNA molecule and the second gRNA molecule include targeting domains comprising, e.g., consisting of, SEQ ID NO: 1609 and SEQ ID NO: 1677, respectively. In an aspect, the first gRNA molecule and the second gRNA molecule include targeting domains comprising, e.g., consisting of, SEQ ID NO: 1609 and SEQ ID NO: 1626, respectively. In an aspect, the first gRNA molecule and the second gRNA molecule include targeting domains comprising, e.g., consisting of, SEQ ID NO: 1621 and SEQ ID NO: 1638, respectively. In an aspect, the first gRNA molecule and the second gRNA molecule include targeting domains comprising, e.g., consisting of, SEQ ID NO: 1621 and SEQ ID NO: 1647, respectively. In an aspect, the first gRNA molecule and the second gRNA molecule include targeting domains comprising, e.g., consisting of, SEQ ID NO: 1621 and SEQ ID NO: 1609, respectively. In an aspect, the first gRNA molecule and the second gRNA molecule include targeting domains comprising, e.g., consisting of, SEQ ID NO: 1621 and SEQ ID NO: 1617, respectively. In an aspect, the first gRNA molecule and the second gRNA molecule include targeting domains comprising, e.g., consisting of, SEQ ID NO: 1621 and SEQ ID NO: 1654, respectively. In an aspect, the first gRNA molecule and the second gRNA molecule include targeting domains comprising, e.g., consisting of, SEQ ID NO: 1621 and SEQ ID NO: 1631, respectively. In an aspect, the first gRNA molecule and the second gRNA molecule include targeting domains comprising, e.g., consisting of, SEQ ID NO: 1621 and SEQ ID NO: 1620, respectively. In an aspect, the first gRNA molecule and the second gRNA molecule include targeting domains comprising, e.g., consisting of, SEQ ID NO: 1621 and SEQ ID NO: 1637, respectively. In an aspect, the first gRNA molecule and the second gRNA molecule include targeting domains comprising, e.g., consisting of, SEQ ID NO: 1621 and SEQ ID NO: 1612, respectively. In an aspect, the first gRNA molecule and the second gRNA molecule include targeting domains comprising, e.g., consisting of, SEQ ID NO: 1621 and SEQ ID NO: 1656, respectively. In an aspect, the first gRNA molecule and the second gRNA molecule include targeting domains comprising, e.g., consisting of, SEQ ID NO: 1621 and SEQ ID NO: 1619, respectively. In an aspect, the first gRNA molecule and the second gRNA molecule include targeting domains comprising, e.g., consisting of, SEQ ID NO: 1621 and SEQ ID NO: 1675, respectively. In an aspect, the first gRNA molecule and the second gRNA molecule include targeting domains comprising, e.g., consisting of, SEQ ID NO: 1621 and SEQ ID NO: 1645, respectively. In an aspect, the first gRNA molecule and the second gRNA molecule include targeting domains comprising, e.g., consisting of, SEQ ID NO: 1621 and SEQ ID NO: 1598, respectively. In an aspect, the first gRNA molecule and the second gRNA molecule include targeting domains comprising, e.g., consisting of, SEQ ID NO: 1621 and SEQ ID NO: 1599, respectively. In an aspect, the first gRNA molecule and the second gRNA molecule include targeting domains comprising, e.g., consisting of, SEQ ID NO: 1621 and SEQ ID NO: 1663, respectively. In an aspect, the first gRNA molecule and the second gRNA molecule include targeting domains comprising, e.g., consisting of, SEQ ID NO: 1621 and SEQ ID NO: 1677, respectively. In an aspect, the first gRNA molecule and the second gRNA molecule include targeting domains comprising, e.g., consisting of, SEQ ID NO: 1621 and SEQ ID NO: 1626, respectively. In an aspect, the first gRNA molecule and the second gRNA molecule include targeting domains comprising, e.g., consisting of, SEQ ID NO: 1617 and SEQ ID NO: 1638, respectively. In an aspect, the first gRNA molecule and the second gRNA molecule include targeting domains comprising, e.g., consisting of, SEQ ID NO: 1617 and SEQ ID NO: 1647, respectively. In an aspect, the first gRNA molecule and the second gRNA molecule include targeting domains comprising, e.g., consisting of, SEQ ID NO: 1617 and SEQ ID NO: 1609, respectively. In an aspect, the first gRNA molecule and the second gRNA molecule include targeting domains comprising, e.g., consisting of, SEQ ID NO: 1617 and SEQ ID NO: 1621, respectively. In an aspect, the first gRNA molecule and the second gRNA molecule include targeting domains comprising, e.g., consisting of, SEQ ID NO: 1617 and SEQ ID NO: 1654, respectively. In an aspect, the first gRNA molecule and the second gRNA molecule include targeting domains comprising, e.g., consisting of, SEQ ID NO: 1617 and SEQ ID NO: 1631, respectively. In an aspect, the first gRNA molecule and the second gRNA molecule include targeting domains comprising, e.g., consisting of, SEQ ID NO: 1617 and SEQ ID NO: 1620, respectively. In an aspect, the first gRNA molecule and the second gRNA molecule include targeting domains comprising, e.g., consisting of, SEQ ID NO: 1617 and SEQ ID NO: 1637, respectively. In an aspect, the first gRNA molecule and the second gRNA molecule include targeting domains comprising, e.g., consisting of, SEQ ID NO: 1617 and SEQ ID NO: 1612, respectively. In an aspect, the first gRNA molecule and the second gRNA molecule include targeting domains comprising, e.g., consisting of, SEQ ID NO: 1617 and SEQ ID NO: 1656, respectively. In an aspect, the first gRNA molecule and the second gRNA molecule include targeting domains comprising, e.g., consisting of, SEQ ID NO: 1617 and SEQ ID NO: 1619, respectively. In an aspect, the first gRNA molecule and the second gRNA molecule include targeting domains comprising, e.g., consisting of, SEQ ID NO: 1617 and SEQ ID NO: 1675, respectively. In an aspect, the first gRNA molecule and the second gRNA molecule include targeting domains comprising, e.g., consisting of, SEQ ID NO: 1617 and SEQ ID NO: 1645, respectively. In an aspect, the first gRNA molecule and the second gRNA molecule include targeting domains comprising, e.g., consisting of, SEQ ID NO: 1617 and SEQ ID NO: 1598, respectively. In an aspect, the first gRNA molecule and the second gRNA molecule include targeting domains comprising, e.g., consisting of, SEQ ID NO: 1617 and SEQ ID NO: 1599, respectively. In an aspect, the first gRNA molecule and the second gRNA molecule include targeting domains comprising, e.g., consisting of, SEQ ID NO: 1617 and SEQ ID NO: 1663, respectively. In an aspect, the first gRNA molecule and the second gRNA molecule include targeting domains comprising, e.g., consisting of, SEQ ID NO: 1617 and SEQ ID NO: 1677, respectively. In an aspect, the first gRNA molecule and the second gRNA molecule include targeting domains comprising, e.g., consisting of, SEQ ID NO: 1617 and SEQ ID NO: 1626, respectively. In an aspect, the first gRNA molecule and the second gRNA molecule include targeting domains comprising, e.g., consisting of, SEQ ID NO: 1654 and SEQ ID NO: 1638, respectively. In an aspect, the first gRNA molecule and the second gRNA molecule include targeting domains comprising, e.g., consisting of, SEQ ID NO: 1654 and SEQ ID NO: 1647, respectively. In an aspect, the first gRNA molecule and the second gRNA molecule include targeting domains comprising, e.g., consisting of, SEQ ID NO: 1654 and SEQ ID NO: 1609, respectively. In an aspect, the first gRNA molecule and the second gRNA molecule include targeting domains comprising, e.g., consisting of, SEQ ID NO: 1654 and SEQ ID NO: 1621, respectively. In an aspect, the first gRNA molecule and the second gRNA molecule include targeting domains comprising, e.g., consisting of, SEQ ID NO: 1654 and SEQ ID NO: 1617, respectively. In an aspect, the first gRNA molecule and the second gRNA molecule include targeting domains comprising, e.g., consisting of, SEQ ID NO: 1654 and SEQ ID NO: 1631, respectively. In an aspect, the first gRNA molecule and the second gRNA molecule include targeting domains comprising, e.g., consisting of, SEQ ID NO: 1654 and SEQ ID NO: 1620, respectively. In an aspect, the first gRNA molecule and the second gRNA molecule include targeting domains comprising, e.g., consisting of, SEQ ID NO: 1654 and SEQ ID NO: 1637, respectively. In an aspect, the first gRNA molecule and the second gRNA molecule include targeting domains comprising, e.g., consisting of, SEQ ID NO: 1654 and SEQ ID NO: 1612, respectively. In an aspect, the first gRNA molecule and the second gRNA molecule include targeting domains comprising, e.g., consisting of, SEQ ID NO: 1654 and SEQ ID NO: 1656, respectively. In an aspect, the first gRNA molecule and the second gRNA molecule include targeting domains comprising, e.g., consisting of, SEQ ID NO: 1654 and SEQ ID NO: 1619, respectively. In an aspect, the first gRNA molecule and the second gRNA molecule include targeting domains comprising, e.g., consisting of, SEQ ID NO: 1654 and SEQ ID NO: 1675, respectively. In an aspect, the first gRNA molecule and the second gRNA molecule include targeting domains comprising, e.g., consisting of, SEQ ID NO: 1654 and SEQ ID NO: 1645, respectively. In an aspect, the first gRNA molecule and the second gRNA molecule include targeting domains comprising, e.g., consisting of, SEQ ID NO: 1654 and SEQ ID NO: 1598, respectively. In an aspect, the first gRNA molecule and the second gRNA molecule include targeting domains comprising, e.g., consisting of, SEQ ID NO: 1654 and SEQ ID NO: 1599, respectively. In an aspect, the first gRNA molecule and the second gRNA molecule include targeting domains comprising, e.g., consisting of, SEQ ID NO: 1654 and SEQ ID NO: 1663, respectively. In an aspect, the first gRNA molecule and the second gRNA molecule include targeting domains comprising, e.g., consisting of, SEQ ID NO: 1654 and SEQ ID NO: 1677, respectively. In an aspect, the first gRNA molecule and the second gRNA molecule include targeting domains comprising, e.g., consisting of, SEQ ID NO: 1654 and SEQ ID NO: 1626, respectively. In an aspect, the first gRNA molecule and the second gRNA molecule include targeting domains comprising, e.g., consisting of, SEQ ID NO: 1631 and SEQ ID NO: 1638, respectively. In an aspect, the first gRNA molecule and the second gRNA molecule include targeting domains comprising, e.g., consisting of, SEQ ID NO: 1631 and SEQ ID NO: 1647, respectively. In an aspect, the first gRNA molecule and the second gRNA molecule include targeting domains comprising, e.g., consisting of, SEQ ID NO: 1631 and SEQ ID NO: 1609, respectively. In an aspect, the first gRNA molecule and the second gRNA molecule include targeting domains comprising, e.g., consisting of, SEQ ID NO: 1631 and SEQ ID NO: 1621, respectively. In an aspect, the first gRNA molecule and the second gRNA molecule include targeting domains comprising, e.g., consisting of, SEQ ID NO: 1631 and SEQ ID NO: 1617, respectively. In an aspect, the first gRNA molecule and the second gRNA molecule include targeting domains comprising, e.g., consisting of, SEQ ID NO: 1631 and SEQ ID NO: 1654, respectively. In an aspect, the first gRNA molecule and the second gRNA molecule include targeting domains comprising, e.g., consisting of, SEQ ID NO: 1631 and SEQ ID NO: 1620, respectively. In an aspect, the first gRNA molecule and the second gRNA molecule include targeting domains comprising, e.g., consisting of, SEQ ID NO: 1631 and SEQ ID NO: 1637, respectively. In an aspect, the first gRNA molecule and the second gRNA molecule include targeting domains comprising, e.g., consisting of, SEQ ID NO: 1631 and SEQ ID NO: 1612, respectively. In an aspect, the first gRNA molecule and the second gRNA molecule include targeting domains comprising, e.g., consisting of, SEQ ID NO: 1631 and SEQ ID NO: 1656, respectively. In an aspect, the first gRNA molecule and the second gRNA molecule include targeting domains comprising, e.g., consisting of, SEQ ID NO: 1631 and SEQ ID NO: 1619, respectively. In an aspect, the first gRNA molecule and the second gRNA molecule include targeting domains comprising, e.g., consisting of, SEQ ID NO: 1631 and SEQ ID NO: 1675, respectively. In an aspect, the first gRNA molecule and the second gRNA molecule include targeting domains comprising, e.g., consisting of, SEQ ID NO: 1631 and SEQ ID NO: 1645, respectively. In an aspect, the first gRNA molecule and the second gRNA molecule include targeting domains comprising, e.g., consisting of, SEQ ID NO: 1631 and SEQ ID NO: 1598, respectively. In an aspect, the first gRNA molecule and the second gRNA molecule include targeting domains comprising, e.g., consisting of, SEQ ID NO: 1631 and SEQ ID NO: 1599, respectively. In an aspect, the first gRNA molecule and the second gRNA molecule include targeting domains comprising, e.g., consisting of, SEQ ID NO: 1631 and SEQ ID NO: 1663, respectively. In an aspect, the first gRNA molecule and the second gRNA molecule include targeting domains comprising, e.g., consisting of, SEQ ID NO: 1631 and SEQ ID NO: 1677, respectively. In an aspect, the first gRNA molecule and the second gRNA molecule include targeting domains comprising, e.g., consisting of, SEQ ID NO: 1631 and SEQ ID NO: 1626, respectively. In an aspect, the first gRNA molecule and the second gRNA molecule include targeting domains comprising, e.g., consisting of, SEQ ID NO: 1620 and SEQ ID NO: 1638, respectively. In an aspect, the first gRNA molecule and the second gRNA molecule include targeting domains comprising, e.g., consisting of, SEQ ID NO: 1620 and SEQ ID NO: 1647, respectively. In an aspect, the first gRNA molecule and the second gRNA molecule include targeting domains comprising, e.g., consisting of, SEQ ID NO: 1620 and SEQ ID NO: 1609, respectively. In an aspect, the first gRNA molecule and the second gRNA molecule include targeting domains comprising, e.g., consisting of, SEQ ID NO: 1620 and SEQ ID NO: 1621, respectively. In an aspect, the first gRNA molecule and the second gRNA molecule include targeting domains comprising, e.g., consisting of, SEQ ID NO: 1620 and SEQ ID NO: 1617, respectively. In an aspect, the first gRNA molecule and the second gRNA molecule include targeting domains comprising, e.g., consisting of, SEQ ID NO: 1620 and SEQ ID NO: 1654, respectively. In an aspect, the first gRNA molecule and the second gRNA molecule include targeting domains comprising, e.g., consisting of, SEQ ID NO: 1620 and SEQ ID NO: 1631, respectively. In an aspect, the first gRNA molecule and the second gRNA molecule include targeting domains comprising, e.g., consisting of, SEQ ID NO: 1620 and SEQ ID NO: 1637, respectively. In an aspect, the first gRNA molecule and the second gRNA molecule include targeting domains comprising, e.g., consisting of, SEQ ID NO: 1620 and SEQ ID NO: 1612, respectively. In an aspect, the first gRNA molecule and the second gRNA molecule include targeting domains comprising, e.g., consisting of, SEQ ID NO: 1620 and SEQ ID NO: 1656, respectively. In an aspect, the first gRNA molecule and the second gRNA molecule include targeting domains comprising, e.g., consisting of, SEQ ID NO: 1620 and SEQ ID NO: 1619, respectively. In an aspect, the first gRNA molecule and the second gRNA molecule include targeting domains comprising, e.g., consisting of, SEQ ID NO: 1620 and SEQ ID NO: 1675, respectively. In an aspect, the first gRNA molecule and the second gRNA molecule include targeting domains comprising, e.g., consisting of, SEQ ID NO: 1620 and SEQ ID NO: 1645, respectively. In an aspect, the first gRNA molecule and the second gRNA molecule include targeting domains comprising, e.g., consisting of, SEQ ID NO: 1620 and SEQ ID NO: 1598, respectively. In an aspect, the first gRNA molecule and the second gRNA molecule include targeting domains comprising, e.g., consisting of, SEQ ID NO: 1620 and SEQ ID NO: 1599, respectively. In an aspect, the first gRNA molecule and the second gRNA molecule include targeting domains comprising, e.g., consisting of, SEQ ID NO: 1620 and SEQ ID NO: 1663, respectively. In an aspect, the first gRNA molecule and the second gRNA molecule include targeting domains comprising, e.g., consisting of, SEQ ID NO: 1620 and SEQ ID NO: 1677, respectively. In an aspect, the first gRNA molecule and the second gRNA molecule include targeting domains comprising, e.g., consisting of, SEQ ID NO: 1620 and SEQ ID NO: 1626, respectively. In an aspect, the first gRNA molecule and the second gRNA molecule include targeting domains comprising, e.g., consisting of, SEQ ID NO: 1637 and SEQ ID NO: 1638, respectively. In an aspect, the first gRNA molecule and the second gRNA molecule include targeting domains comprising, e.g., consisting of, SEQ ID NO: 1637 and SEQ ID NO: 1647, respectively. In an aspect, the first gRNA molecule and the second gRNA molecule include targeting domains comprising, e.g., consisting of, SEQ ID NO: 1637 and SEQ ID NO: 1609, respectively. In an aspect, the first gRNA molecule and the second gRNA molecule include targeting domains comprising, e.g., consisting of, SEQ ID NO: 1637 and SEQ ID NO: 1621, respectively. In an aspect, the first gRNA molecule and the second gRNA molecule include targeting domains comprising, e.g., consisting of, SEQ ID NO: 1637 and SEQ ID NO: 1617, respectively. In an aspect, the first gRNA molecule and the second gRNA molecule include targeting domains comprising, e.g., consisting of, SEQ ID NO: 1637 and SEQ ID NO: 1654, respectively. In an aspect, the first gRNA molecule and the second gRNA molecule include targeting domains comprising, e.g., consisting of, SEQ ID NO: 1637 and SEQ ID NO: 1631, respectively. In an aspect, the first gRNA molecule and the second gRNA molecule include targeting domains comprising, e.g., consisting of, SEQ ID NO: 1637 and SEQ ID NO: 1620, respectively. In an aspect, the first gRNA molecule and the second gRNA molecule include targeting domains comprising, e.g., consisting of, SEQ ID NO: 1637 and SEQ ID NO: 1612, respectively. In an aspect, the first gRNA molecule and the second gRNA molecule include targeting domains comprising, e.g., consisting of, SEQ ID NO: 1637 and SEQ ID NO: 1656, respectively. In an aspect, the first gRNA molecule and the second gRNA molecule include targeting domains comprising, e.g., consisting of, SEQ ID NO: 1637 and SEQ ID NO: 1619, respectively. In an aspect, the first gRNA molecule and the second gRNA molecule include targeting domains comprising, e.g., consisting of, SEQ ID NO: 1637 and SEQ ID NO: 1675, respectively. In an aspect, the first gRNA molecule and the second gRNA molecule include targeting domains comprising, e.g., consisting of, SEQ ID NO: 1637 and SEQ ID NO: 1645, respectively. In an aspect, the first gRNA molecule and the second gRNA molecule include targeting domains comprising, e.g., consisting of, SEQ ID NO: 1637 and SEQ ID NO: 1598, respectively. In an aspect, the first gRNA molecule and the second gRNA molecule include targeting domains comprising, e.g., consisting of, SEQ ID NO: 1637 and SEQ ID NO: 1599, respectively. In an aspect, the first gRNA molecule and the second gRNA molecule include targeting domains comprising, e.g., consisting of, SEQ ID NO: 1637 and SEQ ID NO: 1663, respectively. In an aspect, the first gRNA molecule and the second gRNA molecule include targeting domains comprising, e.g., consisting of, SEQ ID NO: 1637 and SEQ ID NO: 1677, respectively. In an aspect, the first gRNA molecule and the second gRNA molecule include targeting domains comprising, e.g., consisting of, SEQ ID NO: 1637 and SEQ ID NO: 1626, respectively. In an aspect, the first gRNA molecule and the second gRNA molecule include targeting domains comprising, e.g., consisting of, SEQ ID NO: 1612 and SEQ ID NO: 1638, respectively. In an aspect, the first gRNA molecule and the second gRNA molecule include targeting domains comprising, e.g., consisting of, SEQ ID NO: 1612 and SEQ ID NO: 1647, respectively. In an aspect, the first gRNA molecule and the second gRNA molecule include targeting domains comprising, e.g., consisting of, SEQ ID NO: 1612 and SEQ ID NO: 1609, respectively. In an aspect, the first gRNA molecule and the second gRNA molecule include targeting domains comprising, e.g., consisting of, SEQ ID NO: 1612 and SEQ ID NO: 1621, respectively. In an aspect, the first gRNA molecule and the second gRNA molecule include targeting domains comprising, e.g., consisting of, SEQ ID NO: 1612 and SEQ ID NO: 1617, respectively. In an aspect, the first gRNA molecule and the second gRNA molecule include targeting domains comprising, e.g., consisting of, SEQ ID NO: 1612 and SEQ ID NO: 1654, respectively. In an aspect, the first gRNA molecule and the second gRNA molecule include targeting domains comprising, e.g., consisting of, SEQ ID NO: 1612 and SEQ ID NO: 1631, respectively. In an aspect, the first gRNA molecule and the second gRNA molecule include targeting domains comprising, e.g., consisting of, SEQ ID NO: 1612 and SEQ ID NO: 1620, respectively. In an aspect, the first gRNA molecule and the second gRNA molecule include targeting domains comprising, e.g., consisting of, SEQ ID NO: 1612 and SEQ ID NO: 1637, respectively. In an aspect, the first gRNA molecule and the second gRNA molecule include targeting domains comprising, e.g., consisting of, SEQ ID NO: 1612 and SEQ ID NO: 1656, respectively. In an aspect, the first gRNA molecule and the second gRNA molecule include targeting domains comprising, e.g., consisting of, SEQ ID NO: 1612 and SEQ ID NO: 1619, respectively. In an aspect, the first gRNA molecule and the second gRNA molecule include targeting domains comprising, e.g., consisting of, SEQ ID NO: 1612 and SEQ ID NO: 1675, respectively. In an aspect, the first gRNA molecule and the second gRNA molecule include targeting domains comprising, e.g., consisting of, SEQ ID NO: 1612 and SEQ ID NO: 1645, respectively. In an aspect, the first gRNA molecule and the second gRNA molecule include targeting domains comprising, e.g., consisting of, SEQ ID NO: 1612 and SEQ ID NO: 1598, respectively. In an aspect, the first gRNA molecule and the second gRNA molecule include targeting domains comprising, e.g., consisting of, SEQ ID NO: 1612 and SEQ ID NO: 1599, respectively. In an aspect, the first gRNA molecule and the second gRNA molecule include targeting domains comprising, e.g., consisting of, SEQ ID NO: 1612 and SEQ ID NO: 1663, respectively. In an aspect, the first gRNA molecule and the second gRNA molecule include targeting domains comprising, e.g., consisting of, SEQ ID NO: 1612 and SEQ ID NO: 1677, respectively. In an aspect, the first gRNA molecule and the second gRNA molecule include targeting domains comprising, e.g., consisting of, SEQ ID NO: 1612 and SEQ ID NO: 1626, respectively. In an aspect, the first gRNA molecule and the second gRNA molecule include targeting domains comprising, e.g., consisting of, SEQ ID NO: 1656 and SEQ ID NO: 1638, respectively. In an aspect, the first gRNA molecule and the second gRNA molecule include targeting domains comprising, e.g., consisting of, SEQ ID NO: 1656 and SEQ ID NO: 1647, respectively. In an aspect, the first gRNA molecule and the second gRNA molecule include targeting domains comprising, e.g., consisting of, SEQ ID NO: 1656 and SEQ ID NO: 1609, respectively. In an aspect, the first gRNA molecule and the second gRNA molecule include targeting domains comprising, e.g., consisting of, SEQ ID NO: 1656 and SEQ ID NO: 1621, respectively. In an aspect, the first gRNA molecule and the second gRNA molecule include targeting domains comprising, e.g., consisting of, SEQ ID NO: 1656 and SEQ ID NO: 1617, respectively. In an aspect, the first gRNA molecule and the second gRNA molecule include targeting domains comprising, e.g., consisting of, SEQ ID NO: 1656 and SEQ ID NO: 1654, respectively. In an aspect, the first gRNA molecule and the second gRNA molecule include targeting domains comprising, e.g., consisting of, SEQ ID NO: 1656 and SEQ ID NO: 1631, respectively. In an aspect, the first gRNA molecule and the second gRNA molecule include targeting domains comprising, e.g., consisting of, SEQ ID NO: 1656 and SEQ ID NO: 1620, respectively. In an aspect, the first gRNA molecule and the second gRNA molecule include targeting domains comprising, e.g., consisting of, SEQ ID NO: 1656 and SEQ ID NO: 1637, respectively. In an aspect, the first gRNA molecule and the second gRNA molecule include targeting domains comprising, e.g., consisting of, SEQ ID NO: 1656 and SEQ ID NO: 1612, respectively. In an aspect, the first gRNA molecule and the second gRNA molecule include targeting domains comprising, e.g., consisting of, SEQ ID NO: 1656 and SEQ ID NO: 1619, respectively. In an aspect, the first gRNA molecule and the second gRNA molecule include targeting domains comprising, e.g., consisting of, SEQ ID NO: 1656 and SEQ ID NO: 1675, respectively. In an aspect, the first gRNA molecule and the second gRNA molecule include targeting domains comprising, e.g., consisting of, SEQ ID NO: 1656 and SEQ ID NO: 1645, respectively. In an aspect, the first gRNA molecule and the second gRNA molecule include targeting domains comprising, e.g., consisting of, SEQ ID NO: 1656 and SEQ ID NO: 1598, respectively. In an aspect, the first gRNA molecule and the second gRNA molecule include targeting domains comprising, e.g., consisting of, SEQ ID NO: 1656 and SEQ ID NO: 1599, respectively. In an aspect, the first gRNA molecule and the second gRNA molecule include targeting domains comprising, e.g., consisting of, SEQ ID NO: 1656 and SEQ ID NO: 1663, respectively. In an aspect, the first gRNA molecule and the second gRNA molecule include targeting domains comprising, e.g., consisting of, SEQ ID NO: 1656 and SEQ ID NO: 1677, respectively. In an aspect, the first gRNA molecule and the second gRNA molecule include targeting domains comprising, e.g., consisting of, SEQ ID NO: 1656 and SEQ ID NO: 1626, respectively. In an aspect, the first gRNA molecule and the second gRNA molecule include targeting domains comprising, e.g., consisting of, SEQ ID NO: 1619 and SEQ ID NO: 1638, respectively. In an aspect, the first gRNA molecule and the second gRNA molecule include targeting domains comprising, e.g., consisting of, SEQ ID NO: 1619 and SEQ ID NO: 1647, respectively. In an aspect, the first gRNA molecule and the second gRNA molecule include targeting domains comprising, e.g., consisting of, SEQ ID NO: 1619 and SEQ ID NO: 1609, respectively. In an aspect, the first gRNA molecule and the second gRNA molecule include targeting domains comprising, e.g., consisting of, SEQ ID NO: 1619 and SEQ ID NO: 1621, respectively. In an aspect, the first gRNA molecule and the second gRNA molecule include targeting domains comprising, e.g., consisting of, SEQ ID NO: 1619 and SEQ ID NO: 1617, respectively. In an aspect, the first gRNA molecule and the second gRNA molecule include targeting domains comprising, e.g., consisting of, SEQ ID NO: 1619 and SEQ ID NO: 1654, respectively. In an aspect, the first gRNA molecule and the second gRNA molecule include targeting domains comprising, e.g., consisting of, SEQ ID NO: 1619 and SEQ ID NO: 1631, respectively. In an aspect, the first gRNA molecule and the second gRNA molecule include targeting domains comprising, e.g., consisting of, SEQ ID NO: 1619 and SEQ ID NO: 1620, respectively. In an aspect, the first gRNA molecule and the second gRNA molecule include targeting domains comprising, e.g., consisting of, SEQ ID NO: 1619 and SEQ ID NO: 1637, respectively. In an aspect, the first gRNA molecule and the second gRNA molecule include targeting domains comprising, e.g., consisting of, SEQ ID NO: 1619 and SEQ ID NO: 1612, respectively. In an aspect, the first gRNA molecule and the second gRNA molecule include targeting domains comprising, e.g., consisting of, SEQ ID NO: 1619 and SEQ ID NO: 1656, respectively. In an aspect, the first gRNA molecule and the second gRNA molecule include targeting domains comprising, e.g., consisting of, SEQ ID NO: 1619 and SEQ ID NO: 1675, respectively. In an aspect, the first gRNA molecule and the second gRNA molecule include targeting domains comprising, e.g., consisting of, SEQ ID NO: 1619 and SEQ ID NO: 1645, respectively. In an aspect, the first gRNA molecule and the second gRNA molecule include targeting domains comprising, e.g., consisting of, SEQ ID NO: 1619 and SEQ ID NO: 1598, respectively. In an aspect, the first gRNA molecule and the second gRNA molecule include targeting domains comprising, e.g., consisting of, SEQ ID NO: 1619 and SEQ ID NO: 1599, respectively. In an aspect, the first gRNA molecule and the second gRNA molecule include targeting domains comprising, e.g., consisting of, SEQ ID NO: 1619 and SEQ ID NO: 1663, respectively. In an aspect, the first gRNA molecule and the second gRNA molecule include targeting domains comprising, e.g., consisting of, SEQ ID NO: 1619 and SEQ ID NO: 1677, respectively. In an aspect, the first gRNA molecule and the second gRNA molecule include targeting domains comprising, e.g., consisting of, SEQ ID NO: 1619 and SEQ ID NO: 1626, respectively. In an aspect, the first gRNA molecule and the second gRNA molecule include targeting domains comprising, e.g., consisting of, SEQ ID NO: 1675 and SEQ ID NO: 1638, respectively. In an aspect, the first gRNA molecule and the second gRNA molecule include targeting domains comprising, e.g., consisting of, SEQ ID NO: 1675 and SEQ ID NO: 1647, respectively. In an aspect, the first gRNA molecule and the second gRNA molecule include targeting domains comprising, e.g., consisting of, SEQ ID NO: 1675 and SEQ ID NO: 1609, respectively. In an aspect, the first gRNA molecule and the second gRNA molecule include targeting domains comprising, e.g., consisting of, SEQ ID NO: 1675 and SEQ ID NO: 1621, respectively. In an aspect, the first gRNA molecule and the second gRNA molecule include targeting domains comprising, e.g., consisting of, SEQ ID NO: 1675 and SEQ ID NO: 1617, respectively. In an aspect, the first gRNA molecule and the second gRNA molecule include targeting domains comprising, e.g., consisting of, SEQ ID NO: 1675 and SEQ ID NO: 1654, respectively. In an aspect, the first gRNA molecule and the second gRNA molecule include targeting domains comprising, e.g., consisting of, SEQ ID NO: 1675 and SEQ ID NO: 1631, respectively. In an aspect, the first gRNA molecule and the second gRNA molecule include targeting domains comprising, e.g., consisting of, SEQ ID NO: 1675 and SEQ ID NO: 1620, respectively. In an aspect, the first gRNA molecule and the second gRNA molecule include targeting domains comprising, e.g., consisting of, SEQ ID NO: 1675 and SEQ ID NO: 1637, respectively. In an aspect, the first gRNA molecule and the second gRNA molecule include targeting domains comprising, e.g., consisting of, SEQ ID NO: 1675 and SEQ ID NO: 1612, respectively. In an aspect, the first gRNA molecule and the second gRNA molecule include targeting domains comprising, e.g., consisting of, SEQ ID NO: 1675 and SEQ ID NO: 1656, respectively. In an aspect, the first gRNA molecule and the second gRNA molecule include targeting domains comprising, e.g., consisting of, SEQ ID NO: 1675 and SEQ ID NO: 1619, respectively. In an aspect, the first gRNA molecule and the second gRNA molecule include targeting domains comprising, e.g., consisting of, SEQ ID NO: 1675 and SEQ ID NO: 1645, respectively. In an aspect, the first gRNA molecule and the second gRNA molecule include targeting domains comprising, e.g., consisting of, SEQ ID NO: 1675 and SEQ ID NO: 1598, respectively. In an aspect, the first gRNA molecule and the second gRNA molecule include targeting domains comprising, e.g., consisting of, SEQ ID NO: 1675 and SEQ ID NO: 1599, respectively. In an aspect, the first gRNA molecule and the second gRNA molecule include targeting domains comprising, e.g., consisting of, SEQ ID NO: 1675 and SEQ ID NO: 1663, respectively. In an aspect, the first gRNA molecule and the second gRNA molecule include targeting domains comprising, e.g., consisting of, SEQ ID NO: 1675 and SEQ ID NO: 1677, respectively. In an aspect, the first gRNA molecule and the second gRNA molecule include targeting domains comprising, e.g., consisting of, SEQ ID NO: 1675 and SEQ ID NO: 1626, respectively. In an aspect, the first gRNA molecule and the second gRNA molecule include targeting domains comprising, e.g., consisting of, SEQ ID NO: 1645 and SEQ ID NO: 1638, respectively. In an aspect, the first gRNA molecule and the second gRNA molecule include targeting domains comprising, e.g., consisting of, SEQ ID NO: 1645 and SEQ ID NO: 1647, respectively. In an aspect, the first gRNA molecule and the second gRNA molecule include targeting domains comprising, e.g., consisting of, SEQ ID NO: 1645 and SEQ ID NO: 1609, respectively. In an aspect, the first gRNA molecule and the second gRNA molecule include targeting domains comprising, e.g., consisting of, SEQ ID NO: 1645 and SEQ ID NO: 1621, respectively. In an aspect, the first gRNA molecule and the second gRNA molecule include targeting domains comprising, e.g., consisting of, SEQ ID NO: 1645 and SEQ ID NO: 1617, respectively. In an aspect, the first gRNA molecule and the second gRNA molecule include targeting domains comprising, e.g., consisting of, SEQ ID NO: 1645 and SEQ ID NO: 1654, respectively. In an aspect, the first gRNA molecule and the second gRNA molecule include targeting domains comprising, e.g., consisting of, SEQ ID NO: 1645 and SEQ ID NO: 1631, respectively. In an aspect, the first gRNA molecule and the second gRNA molecule include targeting domains comprising, e.g., consisting of, SEQ ID NO: 1645 and SEQ ID NO: 1620, respectively. In an aspect, the first gRNA molecule and the second gRNA molecule include targeting domains comprising, e.g., consisting of, SEQ ID NO: 1645 and SEQ ID NO: 1637, respectively. In an aspect, the first gRNA molecule and the second gRNA molecule include targeting domains comprising, e.g., consisting of, SEQ ID NO: 1645 and SEQ ID NO: 1612, respectively. In an aspect, the first gRNA molecule and the second gRNA molecule include targeting domains comprising, e.g., consisting of, SEQ ID NO: 1645 and SEQ ID NO: 1656, respectively. In an aspect, the first gRNA molecule and the second gRNA molecule include targeting domains comprising, e.g., consisting of, SEQ ID NO: 1645 and SEQ ID NO: 1619, respectively. In an aspect, the first gRNA molecule and the second gRNA molecule include targeting domains comprising, e.g., consisting of, SEQ ID NO: 1645 and SEQ ID NO: 1675, respectively. In an aspect, the first gRNA molecule and the second gRNA molecule include targeting domains comprising, e.g., consisting of, SEQ ID NO: 1598 and SEQ ID NO: 1638, respectively. In an aspect, the first gRNA molecule and the second gRNA molecule include targeting domains comprising, e.g., consisting of, SEQ ID NO: 1598 and SEQ ID NO: 1647, respectively. In an aspect, the first gRNA molecule and the second gRNA molecule include targeting domains comprising, e.g., consisting of, SEQ ID NO: 1598 and SEQ ID NO: 1609, respectively. In an aspect, the first gRNA molecule and the second gRNA molecule include targeting domains comprising, e.g., consisting of, SEQ ID NO: 1598 and SEQ ID NO: 1621, respectively. In an aspect, the first gRNA molecule and the second gRNA molecule include targeting domains comprising, e.g., consisting of, SEQ ID NO: 1598 and SEQ ID NO: 1617, respectively. In an aspect, the first gRNA molecule and the second gRNA molecule include targeting domains comprising, e.g., consisting of, SEQ ID NO: 1598 and SEQ ID NO: 1654, respectively. In an aspect, the first gRNA molecule and the second gRNA molecule include targeting domains comprising, e.g., consisting of, SEQ ID NO: 1598 and SEQ ID NO: 1631, respectively. In an aspect, the first gRNA molecule and the second gRNA molecule include targeting domains comprising, e.g., consisting of, SEQ ID NO: 1598 and SEQ ID NO: 1620, respectively. In an aspect, the first gRNA molecule and the second gRNA molecule include targeting domains comprising, e.g., consisting of, SEQ ID NO: 1598 and SEQ ID NO: 1637, respectively. In an aspect, the first gRNA molecule and the second gRNA molecule include targeting domains comprising, e.g., consisting of, SEQ ID NO: 1598 and SEQ ID NO: 1612, respectively. In an aspect, the first gRNA molecule and the second gRNA molecule include targeting domains comprising, e.g., consisting of, SEQ ID NO: 1598 and SEQ ID NO: 1656, respectively. In an aspect, the first gRNA molecule and the second gRNA molecule include targeting domains comprising, e.g., consisting of, SEQ ID NO: 1598 and SEQ ID NO: 1619, respectively. In an aspect, the first gRNA molecule and the second gRNA molecule include targeting domains comprising, e.g., consisting of, SEQ ID NO: 1598 and SEQ ID NO: 1675, respectively. In an aspect, the first gRNA molecule and the second gRNA molecule include targeting domains comprising, e.g., consisting of, SEQ ID NO: 1598 and SEQ ID NO: 1645, respectively. In an aspect, the first gRNA molecule and the second gRNA molecule include targeting domains comprising, e.g., consisting of, SEQ ID NO: 1598 and SEQ ID NO: 1599, respectively. In an aspect, the first gRNA molecule and the second gRNA molecule include targeting domains comprising, e.g., consisting of, SEQ ID NO: 1598 and SEQ ID NO: 1663, respectively. In an aspect, the first gRNA molecule and the second gRNA molecule include targeting domains comprising, e.g., consisting of, SEQ ID NO: 1598 and SEQ ID NO: 1677, respectively. In an aspect, the first gRNA molecule and the second gRNA molecule include targeting domains comprising, e.g., consisting of, SEQ ID NO: 1598 and SEQ ID NO: 1626, respectively. In an aspect, the first gRNA molecule and the second gRNA molecule include targeting domains comprising, e.g., consisting of, SEQ ID NO: 1599 and SEQ ID NO: 1638, respectively. In an aspect, the first gRNA molecule and the second gRNA molecule include targeting domains comprising, e.g., consisting of, SEQ ID NO: 1599 and SEQ ID NO: 1647, respectively. In an aspect, the first gRNA molecule and the second gRNA molecule include targeting domains comprising, e.g., consisting of, SEQ ID NO: 1599 and SEQ ID NO: 1609, respectively. In an aspect, the first gRNA molecule and the second gRNA molecule include targeting domains comprising, e.g., consisting of, SEQ ID NO: 1599 and SEQ ID NO: 1621, respectively. In an aspect, the first gRNA molecule and the second gRNA molecule include targeting domains comprising, e.g., consisting of, SEQ ID NO: 1599 and SEQ ID NO: 1617, respectively. In an aspect, the first gRNA molecule and the second gRNA molecule include targeting domains comprising, e.g., consisting of, SEQ ID NO: 1599 and SEQ ID NO: 1654, respectively. In an aspect, the first gRNA molecule and the second gRNA molecule include targeting domains comprising, e.g., consisting of, SEQ ID NO: 1599 and SEQ ID NO: 1631, respectively. In an aspect, the first gRNA molecule and the second gRNA molecule include targeting domains comprising, e.g., consisting of, SEQ ID NO: 1599 and SEQ ID NO: 1620, respectively. In an aspect, the first gRNA molecule and the second gRNA molecule include targeting domains comprising, e.g., consisting of, SEQ ID NO: 1599 and SEQ ID NO: 1637, respectively. In an aspect, the first gRNA molecule and the second gRNA molecule include targeting domains comprising, e.g., consisting of, SEQ ID NO: 1599 and SEQ ID NO: 1612, respectively. In an aspect, the first gRNA molecule and the second gRNA molecule include targeting domains comprising, e.g., consisting of, SEQ ID NO: 1599 and SEQ ID NO: 1656, respectively. In an aspect, the first gRNA molecule and the second gRNA molecule include targeting domains comprising, e.g., consisting of, SEQ ID NO: 1599 and SEQ ID NO: 1619, respectively. In an aspect, the first gRNA molecule and the second gRNA molecule include targeting domains comprising, e.g., consisting of, SEQ ID NO: 1599 and SEQ ID NO: 1675, respectively. In an aspect, the first gRNA molecule and the second gRNA molecule include targeting domains comprising, e.g., consisting of, SEQ ID NO: 1599 and SEQ ID NO: 1645, respectively. In an aspect, the first gRNA molecule and the second gRNA molecule include targeting domains comprising, e.g., consisting of, SEQ ID NO: 1599 and SEQ ID NO: 1598, respectively. In an aspect, the first gRNA molecule and the second gRNA molecule include targeting domains comprising, e.g., consisting of, SEQ ID NO: 1599 and SEQ ID NO: 1663, respectively. In an aspect, the first gRNA molecule and the second gRNA molecule include targeting domains comprising, e.g., consisting of, SEQ ID NO: 1599 and SEQ ID NO: 1677, respectively. In an aspect, the first gRNA molecule and the second gRNA molecule include targeting domains comprising, e.g., consisting of, SEQ ID NO: 1599 and SEQ ID NO: 1626, respectively. In an aspect, the first gRNA molecule and the second gRNA molecule include targeting domains comprising, e.g., consisting of, SEQ ID NO: 1663 and SEQ ID NO: 1638, respectively. In an aspect, the first gRNA molecule and the second gRNA molecule include targeting domains comprising, e.g., consisting of, SEQ ID NO: 1663 and SEQ ID NO: 1647, respectively. In an aspect, the first gRNA molecule and the second gRNA molecule include targeting domains comprising, e.g., consisting of, SEQ ID NO: 1663 and SEQ ID NO: 1609, respectively. In an aspect, the first gRNA molecule and the second gRNA molecule include targeting domains comprising, e.g., consisting of, SEQ ID NO: 1663 and SEQ ID NO: 1621, respectively. In an aspect, the first gRNA molecule and the second gRNA molecule include targeting domains comprising, e.g., consisting of, SEQ ID NO: 1663 and SEQ ID NO: 1617, respectively. In an aspect, the first gRNA molecule and the second gRNA molecule include targeting domains comprising, e.g., consisting of, SEQ ID NO: 1663 and SEQ ID NO: 1654, respectively. In an aspect, the first gRNA molecule and the second gRNA molecule include targeting domains comprising, e.g., consisting of, SEQ ID NO: 1663 and SEQ ID NO: 1631, respectively. In an aspect, the first gRNA molecule and the second gRNA molecule include targeting domains comprising, e.g., consisting of, SEQ ID NO: 1663 and SEQ ID NO: 1620, respectively. In an aspect, the first gRNA molecule and the second gRNA molecule include targeting domains comprising, e.g., consisting of, SEQ ID NO: 1663 and SEQ ID NO: 1637, respectively. In an aspect, the first gRNA molecule and the second gRNA molecule include targeting domains comprising, e.g., consisting of, SEQ ID NO: 1663 and SEQ ID NO: 1612, respectively. In an aspect, the first gRNA molecule and the second gRNA molecule include targeting domains comprising, e.g., consisting of, SEQ ID NO: 1663 and SEQ ID NO: 1656, respectively. In an aspect, the first gRNA molecule and the second gRNA molecule include targeting domains comprising, e.g., consisting of, SEQ ID NO: 1663 and SEQ ID NO: 1619, respectively. In an aspect, the first gRNA molecule and the second gRNA molecule include targeting domains comprising, e.g., consisting of, SEQ ID NO: 1663 and SEQ ID NO: 1675, respectively. In an aspect, the first gRNA molecule and the second gRNA molecule include targeting domains comprising, e.g., consisting of, SEQ ID NO: 1663 and SEQ ID NO: 1645, respectively. In an aspect, the first gRNA molecule and the second gRNA molecule include targeting domains comprising, e.g., consisting of, SEQ ID NO: 1663 and SEQ ID NO: 1598, respectively. In an aspect, the first gRNA molecule and the second gRNA molecule include targeting domains comprising, e.g., consisting of, SEQ ID NO: 1663 and SEQ ID NO: 1599, respectively. In an aspect, the first gRNA molecule and the second gRNA molecule include targeting domains comprising, e.g., consisting of, SEQ ID NO: 1663 and SEQ ID NO: 1677, respectively. In an aspect, the first gRNA molecule and the second gRNA molecule include targeting domains comprising, e.g., consisting of, SEQ ID NO: 1663 and SEQ ID NO: 1626, respectively. In an aspect, the first gRNA molecule and the second gRNA molecule include targeting domains comprising, e.g., consisting of, SEQ ID NO: 1677 and SEQ ID NO: 1638, respectively. In an aspect, the first gRNA molecule and the second gRNA molecule include targeting domains comprising, e.g., consisting of, SEQ ID NO: 1677 and SEQ ID NO: 1647, respectively. In an aspect, the first gRNA molecule and the second gRNA molecule include targeting domains comprising, e.g., consisting of, SEQ ID NO: 1677 and SEQ ID NO: 1609, respectively. In an aspect, the first gRNA molecule and the second gRNA molecule include targeting domains comprising, e.g., consisting of, SEQ ID NO: 1677 and SEQ ID NO: 1621, respectively. In an aspect, the first gRNA molecule and the second gRNA molecule include targeting domains comprising, e.g., consisting of, SEQ ID NO: 1677 and SEQ ID NO: 1617, respectively. In an aspect, the first gRNA molecule and the second gRNA molecule include targeting domains comprising, e.g., consisting of, SEQ ID NO: 1677 and SEQ ID NO: 1654, respectively. In an aspect, the first gRNA molecule and the second gRNA molecule include targeting domains comprising, e.g., consisting of, SEQ ID NO: 1677 and SEQ ID NO: 1631, respectively. In an aspect, the first gRNA molecule and the second gRNA molecule include targeting domains comprising, e.g., consisting of, SEQ ID NO: 1677 and SEQ ID NO: 1620, respectively. In an aspect, the first gRNA molecule and the second gRNA molecule include targeting domains comprising, e.g., consisting of, SEQ ID NO: 1677 and SEQ ID NO: 1637, respectively. In an aspect, the first gRNA molecule and the second gRNA molecule include targeting domains comprising, e.g., consisting of, SEQ ID NO: 1677 and SEQ ID NO: 1612, respectively. In an aspect, the first gRNA molecule and the second gRNA molecule include targeting domains comprising, e.g., consisting of, SEQ ID NO: 1677 and SEQ ID NO: 1656, respectively. In an aspect, the first gRNA molecule and the second gRNA molecule include targeting domains comprising, e.g., consisting of, SEQ ID NO: 1677 and SEQ ID NO: 1619, respectively. In an aspect, the first gRNA molecule and the second gRNA molecule include targeting domains comprising, e.g., consisting of, SEQ ID NO: 1677 and SEQ ID NO: 1675, respectively. In an aspect, the first gRNA molecule and the second gRNA molecule include targeting domains comprising, e.g., consisting of, SEQ ID NO: 1677 and SEQ ID NO: 1645, respectively. In an aspect, the first gRNA molecule and the second gRNA molecule include targeting domains comprising, e.g., consisting of, SEQ ID NO: 1677 and SEQ ID NO: 1598, respectively. In an aspect, the first gRNA molecule and the second gRNA molecule include targeting domains comprising, e.g., consisting of, SEQ ID NO: 1677 and SEQ ID NO: 1599, respectively. In an aspect, the first gRNA molecule and the second gRNA molecule include targeting domains comprising, e.g., consisting of, SEQ ID NO: 1677 and SEQ ID NO: 1663, respectively. In an aspect, the first gRNA molecule and the second gRNA molecule include targeting domains comprising, e.g., consisting of, SEQ ID NO: 1677 and SEQ ID NO: 1626, respectively. In an aspect, the first gRNA molecule and the second gRNA molecule include targeting domains comprising, e.g., consisting of, SEQ ID NO: 1626 and SEQ ID NO: 1638, respectively. In an aspect, the first gRNA molecule and the second gRNA molecule include targeting domains comprising, e.g., consisting of, SEQ ID NO: 1626 and SEQ ID NO: 1647, respectively. In an aspect, the first gRNA molecule and the second gRNA molecule include targeting domains comprising, e.g., consisting of, SEQ ID NO: 1626 and SEQ ID NO: 1609, respectively. In an aspect, the first gRNA molecule and the second gRNA molecule include targeting domains comprising, e.g., consisting of, SEQ ID NO: 1626 and SEQ ID NO: 1621, respectively. In an aspect, the first gRNA molecule and the second gRNA molecule include targeting domains comprising, e.g., consisting of, SEQ ID NO: 1626 and SEQ ID NO: 1617, respectively. In an aspect, the first gRNA molecule and the second gRNA molecule include targeting domains comprising, e.g., consisting of, SEQ ID NO: 1626 and SEQ ID NO: 1654, respectively. In an aspect, the first gRNA molecule and the second gRNA molecule include targeting domains comprising, e.g., consisting of, SEQ ID NO: 1626 and SEQ ID NO: 1631, respectively. In an aspect, the first gRNA molecule and the second gRNA molecule include targeting domains comprising, e.g., consisting of, SEQ ID NO: 1626 and SEQ ID NO: 1620, respectively. In an aspect, the first gRNA molecule and the second gRNA molecule include targeting domains comprising, e.g., consisting of, SEQ ID NO: 1626 and SEQ ID NO: 1637, respectively. In an aspect, the first gRNA molecule and the second gRNA molecule include targeting domains comprising, e.g., consisting of, SEQ ID NO: 1626 and SEQ ID NO: 1612, respectively. In an aspect, the first gRNA molecule and the second gRNA molecule include targeting domains comprising, e.g., consisting of, SEQ ID NO: 1626 and SEQ ID NO: 1656, respectively. In an aspect, the first gRNA molecule and the second gRNA molecule include targeting domains comprising, e.g., consisting of, SEQ ID NO: 1626 and SEQ ID NO: 1619, respectively. In an aspect, the first gRNA molecule and the second gRNA molecule include targeting domains comprising, e.g., consisting of, SEQ ID NO: 1626 and SEQ ID NO: 1675, respectively. In an aspect, the first gRNA molecule and the second gRNA molecule include targeting domains comprising, e.g., consisting of, SEQ ID NO: 1626 and SEQ ID NO: 1645, respectively. In an aspect, the first gRNA molecule and the second gRNA molecule include targeting domains comprising, e.g., consisting of, SEQ ID NO: 1626 and SEQ ID NO: 1598, respectively. In an aspect, the first gRNA molecule and the second gRNA molecule include targeting domains comprising, e.g., consisting of, SEQ ID NO: 1626 and SEQ ID NO: 1599, respectively. In an aspect, the first gRNA molecule and the second gRNA molecule include targeting domains comprising, e.g., consisting of, SEQ ID NO: 1626 and SEQ ID NO: 1663, respectively. In an aspect, the first gRNA molecule and the second gRNA molecule include targeting domains comprising, e.g., consisting of, SEQ ID NO: 1626 and SEQ ID NO: 1677, respectively.

[0478] III. Methods for Designing gRNAs

[0479] Methods for designing gRNAs are described herein, including methods for selecting, designing and validating target sequences. Exemplary targeting domains are also provided herein. Targeting Domains discussed herein can be incorporated into the gRNAs described herein.

[0480] Methods for selection and validation of target sequences as well as off-target analyses are described, e.g., in. Mali el al., 2013 SCIENCE 339(6121): 823-826; Hsu et al, 2013 NAT BIOTECHNOL, 31 (9): 827-32; Fu et al, 2014 NAT BIOTECHNOL, doi: 10.1038/nbt.2808. PubMed PM ID: 24463574; Heigwer et al, 2014 NAT METHODS 11(2): 122-3. doi: 10.1038/nmeth.2812. PubMed PMID: 24481216; Bae el al, 2014 BIOINFORMATICS PubMed PMID: 24463181; Xiao A el al, 2014 BIOINFORMATICS PubMed PMID: 24389662.

[0481] For example, a software tool can be used to optimize the choice of gRNA within a user's target sequence, e.g., to minimize total off-target activity across the genome. Off target activity may be other than cleavage. For each possible gRNA choice e.g., using S. pyogenes Cas9, the tool can identify all off-target sequences (e.g., preceding either NAG or NGG PAMs) across the genome that contain up to certain number (e.g., 1, 2, 3, 4, 5, 6, 7, 8, 9, or 10) of mismatched base-pairs. The cleavage efficiency at each off-target sequence can be predicted, e.g., using an experimentally-derived weighting scheme. Each possible gRNA is then ranked according to its total predicted off-target cleavage; the top-ranked gRNAs represent those that are likely to have the greatest on-target and the least off-target cleavage. Other functions, e.g., automated reagent design for CRISPR construction, primer design for the on-target Surveyor assay, and primer design for high-throughput detection and quantification of off-target cleavage via next-gen sequencing, can also be included in the tool. Candidate gRNA molecules can be evaluated by art-known methods or as described herein.

[0482] Although software algorithms may be used to generate an initial list of potential gRNA molecules, cutting efficiency and specificity will not necessarily reflect the predicted values, and gRNA molecules typically require screening in specific cell lines, e.g., primary human cell lines, e.g., human HSPCs, e.g., human CD34+ cells, to determine, for example, cutting efficiency, indel formation, cutting specificity and change in desired phenotype. These properties may be assayed by the methods described herein.

[0483] In aspects of the invention, a gRNA comprising the targeting domain of CR00312 (SEQ ID NO: 248, underlined below), e.g., one of the gRNA molecules described below, is useful in the CRISPR systems, methods, cells and other aspects and embodiments of the invention, including in aspects involving more than one gRNA molecule, e.g., described herein:

sgRNA CR00312 #1:
(SEQ ID NO: 342)
GUUUGGCCUCUGAUUAGGGUGUUUUAGAGCUAGAAAUAGCAAGUUAAAAU
AAGGCUAGUCCGUUAUCAACUUGAAAAAGUGGCACCGAGUCGGUGCUUUU
sgRNA CR00312 #2:
(SEQ ID NO: 343)
mG*mU*mU*UGGCCUCUGAUUAGGGUGUUUUAGAGCUAGAAAUAGCAAGU
UAAAAUAAGGCUAGUCCGUUAUCAACUUGAAAAAGUGGCACCGAGUCGGU
GCU*mU*mU*mU
sgRNA CR00312 #3:
(SEQ ID NO: 1762))
mG*mU*mU*UGGCCUCUGAUUAGGGUGUUUUAGAGCUAGAAAUAGCAAGU
UAAAAUAAGGCUAGUCCGUUAUCAACUUGAAAAAGUGGCACCGAGUCGGU
GCmU*mU*mU*U
dgRNA CR00312 #1:
crRNA:
(SEQ ID NO: 344)
GUUUGGCCUCUGAUUAGGGUGUUUUAGAGCUAUGCUGUUUUG
tracr:
(SEQ ID NO: 6660)
AACAGCAUAGCAAGUUAAAAUAAGGCUAGUCCGUUAUCAACUUGAAAAAG
UGGCACCGAGUCGGUGCUUUUUUU
dgRNA CR00312 #2:
crRNA:
(SEQ ID NO: 345)
mG*mU*mU*UGGCCUCUGAUUAGGGUGUUUUAGAGCUAUGCUGUU*mU*m
U*mG
tracr:
(SEQ ID NO: 346)
mA*mA*mC*AGCAUAGCAAGUUAAAAUAAGGCUAGUCCGUUAUCAACUUG
AAAAAGUGGCACCGAGUCGGUGCUUUU*mU*mU*mU
dgRNA CR00312 #3:
crRNA:
(SEQ ID NO: 345)
mG*mU*mU*UGGCCUCUGAUUAGGGUGUUUUAGAGCUAUGCUGUU*mU*m
U*mG
tracr:
(SEQ ID NO: 6660)
AACAGCAUAGCAAGUUAAAAUAAGGCUAGUCCGUUAUCAACUUGAAAAAG
UGGCACCGAGUCGGUGCUUUUUUU.

[0484] In aspects of the invention, a gRNA comprising the targeting domain of CR001128 (SEQ ID NO: 338, underlined below), e.g., one of the gRNA molecules described below, is useful in the CRISPR systems, methods, cells and other aspects and embodiments of the invention, including in aspects involving more than one gRNA molecule, e.g., described herein:

sgRNA CR001128 #1:
(SEQ ID NO: 347)
AUCAGAGGCCAAACCCUUCCGUUUUAGAGCUAGAAAUAGCAAGUUAAAAU
AAGGCUAGUCCGUUAUCAACUUGAAAAAGUGGCACCGAGUCGGUGCUUUU
sgRNA CR001128 #2:
(SEQ ID NO: 348)
mA*mU*mC*AGAGGCCAAACCCUUCCGUUUUAGAGCUAGAAAUAGCAAGU
UAAAAUAAGGCUAGUCCGUUAUCAACUUGAAAAAGUGGCACCGAGUCGGU
GCU*mU*mU*mU
sgRNA CR001128 #3:
(SEQ ID NO: 1763)
mA*mU*mC*AGAGGCCAAACCCUUCCGUUUUAGAGCUAGAAAUAGCAAGU
UAAAAUAAGGCUAGUCCGUUAUCAACUUGAAAAAGUGGCACCGAGUCGGU
GCmU*mU*mU*U
dgRNA CR001128 #1:
crRNA:
(SEQ ID NO: 349)
AUCAGAGGCCAAACCCUUCCGUUUUAGAGCUAUGCUGUUUUG
tracr:
(SEQ ID NO: 6660)
AACAGCAUAGCAAGUUAAAAUAAGGCUAGUCCGUUAUCAACUUGAAAAAG
UGGCACCGAGUCGGUGCUUUUUUU
dgRNA CR001128 #2:
crRNA:
(SEQ ID NO: 350)
mA*mU*mC*AGAGGCCAAACCCUUCCGUUUUAGAGCUAUGCUGUU*mU*m
U*mG
tracr:
(SEQ ID NO: 346)
mA*mA*mC*AGCAUAGCAAGUUAAAAUAAGGCUAGUCCGUUAUCAACUUG
AAAAAGUGGCACCGAGUCGGUGCUUUU*mU*mU*mU
dgRNA CR001128 #3:
crRNA:
(SEQ ID NO: 350)
mA*mU*mC*AGAGGCCAAACCCUUCCGUUUUAGAGCUAUGCUGUU*mU*m
U*mG
tracr:
(SEQ ID NO: 6660)
AACAGCAUAGCAAGUUAAAAUAAGGCUAGUCCGUUAUCAACUUGAAAAAG
UGGCACCGAGUCGGUGCUUUUUUU.

[0485] In aspects of the invention, a gRNA comprising the targeting domain of CR001126 (SEQ ID NO: 336, underlined below), e.g., one of the gRNA molecules described below, is useful in the CRISPR systems, methods, cells and other aspects and embodiments of the invention, including in aspects involving more than one gRNA molecule, e.g., described herein:

sgRNA CR001126 #1:
(SEQ ID NO: 351)
UUUAUCACAGGCUCCAGGAAGUUUUAGAGCUAGAAAUAGCAAGUUAAAAU
AAGGCUAGUCCGUUAUCAACUUGAAAAAGUGGCACCGAGUCGGUGCUUUU
sgRNA CR001126 #2:
(SEQ ID NO: 352)
mU*mU*mU*AUCACAGGCUCCAGGAAGUUUUAGAGCUAGAAAUAGCAAGU
UAAAAUAAGGCUAGUCCGUUAUCAACUUGAAAAAGUGGCACCGAGUCGGU
GCU*mU*mU*mU
sgRNA CR001126 #3:
(SEQ ID NO: 1764)
mU*mU*mU*AUCACAGGCUCCAGGAAGUUUUAGAGCUAGAAAUAGCAAGU
UAAAAUAAGGCUAGUCCGUUAUCAACUUGAAAAAGUGGCACCGAGUCGGU
GCmU*mU*mU*U
dgRNA CR001126 #1:
crRNA:
(SEQ ID NO: 353)
UUUAUCACAGGCUCCAGGAAGUUUUAGAGCUAUGCUGUUUUG
tracr:
(SEQ ID NO: 6660)
AACAGCAUAGCAAGUUAAAAUAAGGCUAGUCCGUUAUCAACUUGAAAAAG
UGGCACCGAGUCGGUGCUUUUUUU
dgRNA CR001126 #2:
crRNA:
(SEQ ID NO: 354)
mU*mU*mU*AUCACAGGCUCCAGGAAGUUUUAGAGCUAUGCUGUU*mU*m
U*mG
tracr:
(SEQ ID NO: 346)
mA*mA*mC*AGCAUAGCAAGUUAAAAUAAGGCUAGUCCGUUAUCAACUUG
AAAAAGUGGCACCGAGUCGGUGCUUUU*mU*mU*mU
dgRNA CR001126 #3:
crRNA:
(SEQ ID NO: 354)
mU*mU*mU*AUCACAGGCUCCAGGAAGUUUUAGAGCUAUGCUGUU*mU*m
U*mG
tracr:
(SEQ ID NO: 6660)
AACAGCAUAGCAAGUUAAAAUAAGGCUAGUCCGUUAUCAACUUGAAAAAG
UGGCACCGAGUCGGUGCUUUUUUU.

[0486] In aspects of the invention, a gRNA comprising the targeting domain of CR00311 (SEQ ID NO: 247, underlined below), e.g., one of the gRNA molecules described below, is useful in the CRISPR systems, methods, cells and other aspects and embodiments of the invention, including in aspects involving more than one gRNA molecule, e.g., described herein:

sgRNA CR00311 #1:
(SEQ ID NO: 355)
UUUGGCCUCUGAUUAGGGUGGUUUUAGAGCUAGAAAUAGCAAGUUAAAAU
AAGGCUAGUCCGUUAUCAACUUGAAAAAGUGGCACCGAGUCGGUGCUUUU
sgRNA CR00311 #2:
(SEQ ID NO: 356)
mU*mU*mU*GGCCUCUGAUUAGGGUGGUUUUAGAGCUAGAAAUAGCAAGU
UAAAAUAAGGCUAGUCCGUUAUCAACUUGAAAAAGUGGCACCGAGUCGGU
GCU*mU*mU*mU
sgRNA CR00311 #3:
(SEQ ID NO: 1765)
mU*mU*mU*GGCCUCUGAUUAGGGUGGUUUUAGAGCUAGAAAUAGCAAGU
UAAAAUAAGGCUAGUCCGUUAUCAACUUGAAAAAGUGGCACCGAGUCGGU
GCmU*mU*mU*U
dgRNA CR00311 #1:
crRNA:
(SEQ ID NO: 357)
UUUGGCCUCUGAUUAGGGUGGUUUUAGAGCUAUGCUGUUUUG
tracr:
(SEQ ID NO: 6660)
AACAGCAUAGCAAGUUAAAAUAAGGCUAGUCCGUUAUCAACUUGAAAAAG
UGGCACCGAGUCGGUGCUUUUUUU
dgRNA CR00311 #2:
crRNA:
(SEQ ID NO: 358)
mU*mU*mU*GGCCUCUGAUUAGGGUGGUUUUAGAGCUAUGCUGUU*mU*m
U*mG
tracr:
(SEQ ID NO: 346)
mA*mA*mC*AGCAUAGCAAGUUAAAAUAAGGCUAGUCCGUUAUCAACUUG
AAAAAGUGGCACCGAGUCGGUGCUUUU*mU*mU*mU
dgRNA CR00311 #3:
crRNA:
(SEQ ID NO: 358)
mU*mU*mU*GGCCUCUGAUUAGGGUGGUUUUAGAGCUAUGCUGUU*mU*m
U*mG
tracr:
(SEQ ID NO: 6660)
AACAGCAUAGCAAGUUAAAAUAAGGCUAGUCCGUUAUCAACUUGAAAAAG
UGGCACCGAGUCGGUGCUUUUUUU.

[0487] In aspects of the invention, a gRNA comprising the targeting domain of CR00309 (SEQ ID NO: 245, underlined below), e.g., one of the gRNA molecules described below, is useful in the CRISPR systems, methods, cells and other aspects and embodiments of the invention, including in aspects involving more than one gRNA molecule, e.g., described herein:

sgRNA CR00309 #1:
(SEQ ID NO: 359)
CACGCCCCCACCCUAAUCAGGUUUUAGAGCUAGAAAUAGCAAGUUAAAAU
AAGGCUAGUCCGUUAUCAACUUGAAAAAGUGGCACCGAGUCGGUGCUUUU
sgRNA CR00309 #2:
(SEQ ID NO: 360)
mC*mA*mC*GCCCCCACCCUAAUCAGGUUUUAGAGCUAGAAAUAGCAAGU
UAAAAUAAGGCUAGUCCGUUAUCAACUUGAAAAAGUGGCACCGAGUCGGU
GCU*mU*mU*mU
sgRNA CR00309 #3:
(SEQ ID NO: 1766)
mC*mA*mC*GCCCCCACCCUAAUCAGGUUUUAGAGCUAGAAAUAGCAAGU
UAAAAUAAGGCUAGUCCGUUAUCAACUUGAAAAAGUGGCACCGAGUCGGU
GCmU*mU*mU*U
dgRNA CR00309 #1:
crRNA:
(SEQ ID NO: 361)
CACGCCCCCACCCUAAUCAGGUUUUAGAGCUAUGCUGUUUUG
tracr:
(SEQ ID NO: 6660)
AACAGCAUAGCAAGUUAAAAUAAGGCUAGUCCGUUAUCAACUUGAAAAAG
UGGCACCGAGUCGGUGCUUUUUUU
dgRNA CR00309 #2:
crRNA:
(SEQ ID NO: 362)
mC*mA*mC*GCCCCCACCCUAAUCAGGUUUUAGAGCUAUGCUGUU*mU*m
U*mG
tracr:
(SEQ ID NO: 346)
mA*mA*mC*AGCAUAGCAAGUUAAAAUAAGGCUAGUCCGUUAUCAACUUG
AAAAAGUGGCACCGAGUCGGUGCUUUU*mU*mU*mU
dgRNA CR00309 #3:
crRNA:
(SEQ ID NO: 362)
mC*mA*mC*GCCCCCACCCUAAUCAGGUUUUAGAGCUAUGCUGUU*mU*m
U*mG
tracr:
(SEQ ID NO: 6660)
AACAGCAUAGCAAGUUAAAAUAAGGCUAGUCCGUUAUCAACUUGAAAAAG
UGGCACCGAGUCGGUGCUUUUUUU.

[0488] In aspects of the invention, a gRNA comprising the targeting domain of CR001127 (SEQ ID NO: 337, underlined below), e.g., one of the gRNA molecules described below, is useful in the CRISPR systems, methods, cells and other aspects and embodiments of the invention, including in aspects involving more than one gRNA molecule, e.g., described herein:

sgRNA CR001127 #1:
(SEQ ID NO: 363)
CACAGGCUCCAGGAAGGGUUGUUUUAGAGCUAGAAAUAGCAAGUUAAAAU
AAGGCUAGUCCGUUAUCAACUUGAAAAAGUGGCACCGAGUCGGUGCUUUU
sgRNA CR001127 #2:
(SEQ ID NO: 364)
mC*mA*mC*AGGCUCCAGGAAGGGUUGUUUUAGAGCUAGAAAUAGCAAGU
UAAAAUAAGGCUAGUCCGUUAUCAACUUGAAAAAGUGGCACCGAGUCGGU
GCU*mU*mU*mU
sgRNA CR001127 #3:
(SEQ ID NO: 1767)
mC*mA*mC*AGGCUCCAGGAAGGGUUGUUUUAGAGCUAGAAAUAGCAAGU
UAAAAUAAGGCUAGUCCGUUAUCAACUUGAAAAAGUGGCACCGAGUCGGU
GCmU*mU*mU*U
dgRNA CR001127 #1:
crRNA:
(SEQ ID NO: 365)
CACAGGCUCCAGGAAGGGUUGUUUUAGAGCUAUGCUGUUUUG
tracr:
(SEQ ID NO: 6660)
AACAGCAUAGCAAGUUAAAAUAAGGCUAGUCCGUUAUCAACUUGAAAAAG
UGGCACCGAGUCGGUGCUUUUUUU
dgRNA CR001127 #2:
crRNA:
(SEQ ID NO: 366)
mC*mA*mC*AGGCUCCAGGAAGGGUUGUUUUAGAGCUAUGCUGUU*mU*m
U*mG
tracr:
(SEQ ID NO: 346)
mA*mA*mC*AGCAUAGCAAGUUAAAAUAAGGCUAGUCCGUUAUCAACUUG
AAAAAGUGGCACCGAGUCGGUGCUUUU*mU*mU*mU
dgRNA CR001127 #3:
crRNA:
(SEQ ID NO: 366)
mC*mA*mC*AGGCUCCAGGAAGGGUUGUUUUAGAGCUAUGCUGUU*mU*m
U*mG
tracr:
(SEQ ID NO: 6660)
AACAGCAUAGCAAGUUAAAAUAAGGCUAGUCCGUUAUCAACUUGAAAAAG
UGGCACCGAGUCGGUGCUUUUUUU.

[0489] In aspects of the invention, a gRNA comprising the targeting domain of CR00316 (SEQ ID NO: 252, underlined below), e.g., one of the gRNA molecules described below, is useful in the CRISPR systems, methods, cells and other aspects and embodiments of the invention, including in aspects involving more than one gRNA molecule, e.g., described herein:

sgRNA CR00316 #1:
(SEQ ID NO: 367)
UUGCUUUUAUCACAGGCUCCGUUUUAGAGCUAGAAAUAGCAAGUUAAAAU
AAGGCUAGUCCGUUAUCAACUUGAAAAAGUGGCACCGAGUCGGUGCUUUU
sgRNA CR00316 #2:
(SEQ ID NO: 368)
mU*mU*mG*CUUUUAUCACAGGCUCCGUUUUAGAGCUAGAAAUAGCAAGU
UAAAAUAAGGCUAGUCCGUUAUCAACUUGAAAAAGUGGCACCGAGUCGGU
GCU*mU*mU*mU
sgRNA CR00316 #3:
(SEQ ID NO: 1768)
mU*mU*mG*CUUUUAUCACAGGCUCCGUUUUAGAGCUAGAAAUAGCAAGU
UAAAAUAAGGCUAGUCCGUUAUCAACUUGAAAAAGUGGCACCGAGUCGGU
GCmU*mU*mU*U
dgRNA CR00316 #1:
crRNA:
(SEQ ID NO: 369)
UUGCUUUUAUCACAGGCUCCGUUUUAGAGCUAUGCUGUUUUG
tracr:
(SEQ ID NO: 6660)
AACAGCAUAGCAAGUUAAAAUAAGGCUAGUCCGUUAUCAACUUGAAAAAG
UGGCACCGAGUCGGUGCUUUUUUU
dgRNA CR00316 #2:
crRNA:
(SEQ ID NO: 370)
mU*mU*mG*CUUUUAUCACAGGCUCCGUUUUAGAGCUAUGCUGUU*mU*m
U*mG
tracr:
(SEQ ID NO: 346)
mA*mA*mC*AGCAUAGCAAGUUAAAAUAAGGCUAGUCCGUUAUCAACUUG
AAAAAGUGGCACCGAGUCGGUGCUUUU*mU*mU*mU
dgRNA CR00316 #3:
crRNA:
(SEQ ID NO: 370)
mU*mU*mG*CUUUUAUCACAGGCUCCGUUUUAGAGCUAUGCUGUU*mU*m
U*mG
tracr:
(SEQ ID NO: 6660)
AACAGCAUAGCAAGUUAAAAUAAGGCUAGUCCGUUAUCAACUUGAAAAAG
UGGCACCGAGUCGGUGCUUUUUUU.

[0490] In aspects of the invention, a gRNA comprising the targeting domain of CR001125 (SEQ ID NO: 335, underlined below), e.g., one of the gRNA molecules described below, is useful in the CRISPR systems, methods, cells and other aspects and embodiments of the invention, including in aspects involving more than one gRNA molecule, e.g., described herein:

sgRNA CR001125 #1:
(SEQ ID NO: 371)
UUUUAUCACAGGCUCCAGGAGUUUUAGAGCUAGAAAUAGCAAGUUAAAAU
AAGGCUAGUCCGUUAUCAACUUGAAAAAGUGGCACCGAGUCGGUGCUUUU
sgRNA CR001125 #2:
(SEQ ID NO: 372)
mU*mU*mU*UAUCACAGGCUCCAGGAGUUUUAGAGCUAGAAAUAGCAAGU
UAAAAUAAGGCUAGUCCGUUAUCAACUUGAAAAAGUGGCACCGAGUCGGU
GCU*mU*mU*mU
sgRNA CR001125 #3:
(SEQ ID NO: 1769)
mU*mU*mU*UAUCACAGGCUCCAGGAGUUUUAGAGCUAGAAAUAGCAAGU
UAAAAUAAGGCUAGUCCGUUAUCAACUUGAAAAAGUGGCACCGAGUCGGU
GCmU*mU*mU*U
dgRNA CR001125 #1:
crRNA:
(SEQ ID NO: 373)
UUUUAUCACAGGCUCCAGGAGUUUUAGAGCUAUGCUGUUUUG
tracr:
(SEQ ID NO: 6660)
AACAGCAUAGCAAGUUAAAAUAAGGCUAGUCCGUUAUCAACUUGAAAAAG
UGGCACCGAGUCGGUGCUUUUUUU
dgRNA CR001125 #2:
crRNA:
(SEQ ID NO: 374)
mU*mU*mU*UAUCACAGGCUCCAGGAGUUUUAGAGCUAUGCUGUU*mU*m
U*mG
tracr:
(SEQ ID NO: 346)
mA*mA*mC*AGCAUAGCAAGUUAAAAUAAGGCUAGUCCGUUAUCAACUUG
AAAAAGUGGCACCGAGUCGGUGCUUUU*mU*mU*mU
dgRNA CR001125 #3:
crRNA:
(SEQ ID NO: 374)
mU*mU*mU*UAUCACAGGCUCCAGGAGUUUUAGAGCUAUGCUGUU*mU*m
U*mG
tracr:
(SEQ ID NO: 6660)
AACAGCAUAGCAAGUUAAAAUAAGGCUAGUCCGUUAUCAACUUGAAAAAG
UGGCACCGAGUCGGUGCUUUUUUU.

[0491] In aspects of the invention, a gRNA comprising the targeting domain of CR001030 (SEQ ID NO: 100, underlined below), e.g., one of the gRNA molecules described below, is useful in the CRISPR systems, methods, cells and other aspects and embodiments of the invention, including in aspects involving more than one gRNA molecule, e.g., described herein:

sgRNA CR001030 #1:
(SEQ ID NO: 375)
ACUGCUGAAAGAGAUGCGGUGUUUUAGAGCUAGAAAUAGCAAGUUAAAAU
AAGGCUAGUCCGUUAUCAACUUGAAAAAGUGGCACCGAGUCGGUGCUUUU
sgRNA CR001030 #2:
(SEQ ID NO: 376)
mA*mC*mU*GCUGAAAGAGAUGCGGUGUUUUAGAGCUAGAAAUAGCAAGU
UAAAAUAAGGCUAGUCCGUUAUCAACUUGAAAAAGUGGCACCGAGUCGGU
GCU*mU*mU*mU
sgRNA CR001030 #3:
(SEQ ID NO: 1770)
mA*mC*mU*GCUGAAAGAGAUGCGGUGUUUUAGAGCUAGAAAUAGCAAGU
UAAAAUAAGGCUAGUCCGUUAUCAACUUGAAAAAGUGGCACCGAGUCGGU
GCmU*mU*mU*U
dgRNA CR001030 #1:
(SEQ ID NO: 377)
crRNA: ACUGCUGAAAGAGAUGCGGUGUUUUAGAGCUAUGCUGUUUUG
tracr:
(SEQ ID NO: 6660)
AACAGCAUAGCAAGUUAAAAUAAGGCUAGUCCGUUAUCAACUUGAAAAAG
UGGCACCGAGUCGGUGCUUUUUUU
dgRNA CR001030 #2:
crRNA:
(SEQ ID NO: 378)
mA*mC*mU*GCUGAAAGAGAUGCGGUGUUUUAGAGCUAUGCUGUU*mU*m
U*mG
tracr:
(SEQ ID NO: 346)
mA*mA*mC*AGCAUAGCAAGUUAAAAUAAGGCUAGUCCGUUAUCAACUUG
AAAAAGUGGCACCGAGUCGGUGCUUUU*mU*mU*mU
dgRNA CR001030 #3:
crRNA:
(SEQ ID NO: 378)
mA*mC*mU*GCUGAAAGAGAUGCGGUGUUUUAGAGCUAUGCUGUU*mU*m
U*mG
tracr:
(SEQ ID NO: 6660)
AACAGCAUAGCAAGUUAAAAUAAGGCUAGUCCGUUAUCAACUUGAAAAAG
UGGCACCGAGUCGGUGCUUUUUUU.

[0492] In aspects of the invention, a gRNA comprising the targeting domain of CR001028 (SEQ ID NO: 98, underlined below), e.g., one of the gRNA molecules described below, is useful in the CRISPR systems, methods, cells and other aspects and embodiments of the invention, including in aspects involving more than one gRNA molecule, e.g., described herein:

sgRNA CR001028 #1:
(SEQ ID NO: 379)
UGCGGUGGGGAGAUAUGUAGGUUUUAGAGCUAGAAAUAGCAAGUUAAAAU
AAGGCUAGUCCGUUAUCAACUUGAAAAAGUGGCACCGAGUCGGUGCUUUU
sgRNA CR001028 #2:
(SEQ ID NO: 380)
mU*mG*mC*GGUGGGGAGAUAUGUAGGUUUUAGAGCUAGAAAUAGCAAGU
UAAAAUAAGGCUAGUCCGUUAUCAACUUGAAAAAGUGGCACCGAGUCGGU
GCU*mU*mU*mU
sgRNA CR001028 #3:
(SEQ ID NO: 1771)
mU*mG*mC*GGUGGGGAGAUAUGUAGGUUUUAGAGCUAGAAAUAGCAAGU
UAAAAUAAGGCUAGUCCGUUAUCAACUUGAAAAAGUGGCACCGAGUCGGU
GCmU*mU*mU*U
dgRNA CR001028 #1:
(SEQ ID NO: 381)
crRNA: UGCGGUGGGGAGAUAUGUAGGUUUUAGAGCUAUGCUGUUUUG
tracr:
(SEQ ID NO: 6660)
AACAGCAUAGCAAGUUAAAAUAAGGCUAGUCCGUUAUCAACUUGAAAAAG
UGGCACCGAGUCGGUGCUUUUUUU
dgRNA CR001028 #2:
crRNA:
(SEQ ID NO: 382)
mU*mG*mC*GGUGGGGAGAUAUGUAGGUUUUAGAGCUAUGCUGUU*mU*m
U*mG
tracr:
(SEQ ID NO: 346)
mA*mA*mC*AGCAUAGCAAGUUAAAAUAAGGCUAGUCCGUUAUCAACUUG
AAAAAGUGGCACCGAGUCGGUGCUUUU*mU*mU*mU
dgRNA CR001028 #3:
crRNA:
(SEQ ID NO: 382)
mU*mG*mC*GGUGGGGAGAUAUGUAGGUUUUAGAGCUAUGCUGUU*mU*m
U*mG
tracr:
(SEQ ID NO: 6660)
AACAGCAUAGCAAGUUAAAAUAAGGCUAGUCCGUUAUCAACUUGAAAAAG
UGGCACCGAGUCGGUGCUUUUUUU.

[0493] In aspects of the invention, a gRNA comprising the targeting domain of CR001221 (SEQ ID NO: 1589, underlined below), e.g., one of the gRNA molecules described below, is useful in the CRISPR systems, methods, cells and other aspects and embodiments of the invention, including in aspects involving more than one gRNA molecule, e.g., described herein:

sgRNA CR001221 #1:
(SEQ ID NO: 383)
GAAACAAUGAGGACCUGACUGUUUUAGAGCUAGAAAUAGCAAGUUAAAAU
AAGGCUAGUCCGUUAUCAACUUGAAAAAGUGGCACCGAGUCGGUGCUUUU
sgRNA CR001221 #2:
(SEQ ID NO: 384)
mG*mA*mA*ACAAUGAGGACCUGACUGUUUUAGAGCUAGAAAUAGCAAGU
UAAAAUAAGGCUAGUCCGUUAUCAACUUGAAAAAGUGGCACCGAGUCGGU
GCU*mU*mU*mU
sgRNA CR001221 #3:
(SEQ ID NO: 1772)
mG*mA*mA*ACAAUGAGGACCUGACUGUUUUAGAGCUAGAAAUAGCAAGU
UAAAAUAAGGCUAGUCCGUUAUCAACUUGAAAAAGUGGCACCGAGUCGGU
GCmU*mU*mU*U
dgRNA CR001221 #1:
(SEQ ID NO: 385)
crRNA: GAAACAAUGAGGACCUGACUGUUUUAGAGCUAUGCUGUUUUG
tracr:
(SEQ ID NO: 6660)
AACAGCAUAGCAAGUUAAAAUAAGGCUAGUCCGUUAUCAACUUGAAAAAG
UGGCACCGAGUCGGUGCUUUUUUU
dgRNA CR001221 #2:
crRNA:
(SEQ ID NO: 386)
mG*mA*mA*ACAAUGAGGACCUGACUGUUUUAGAGCUAUGCUGUU*mU*m
U*mG
tracr:
(SEQ ID NO: 346)
mA*mA*mC*AGCAUAGCAAGUUAAAAUAAGGCUAGUCCGUUAUCAACUUG
AAAAAGUGGCACCGAGUCGGUGCUUUU*mU*mU*mU
dgRNA CR001221 #3:
crRNA:
(SEQ ID NO: 386)
mG*mA*mA*ACAAUGAGGACCUGACUGUUUUAGAGCUAUGCUGUU*mU*m
U*mG
tracr:
(SEQ ID NO: 6660)
AACAGCAUAGCAAGUUAAAAUAAGGCUAGUCCGUUAUCAACUUGAAAAAG
UGGCACCGAGUCGGUGCUUUUUUU.

[0494] In aspects of the invention, a gRNA comprising the targeting domain of CR001137 (SEQ ID NO: 1505, underlined below), e.g., one of the gRNA molecules described below, is useful in the CRISPR systems, methods, cells and other aspects and embodiments of the invention, including in aspects involving more than one gRNA molecule, e.g., described herein:

sgRNA CR001137 #1:
(SEQ ID NO: 387)
GUAAGCAUUUAAGUGGCUACGUUUUAGAGCUAGAAAUAGCAAGUUAAAAU
AAGGCUAGUCCGUUAUCAACUUGAAAAAGUGGCACCGAGUCGGUGCUUUU
sgRNA CR001137 #2:
(SEQ ID NO: 388)
mG*mU*mA*AGCAUUUAAGUGGCUACGUUUUAGAGCUAGAAAUAGCAAGU
UAAAAUAAGGCUAGUCCGUUAUCAACUUGAAAAAGUGGCACCGAGUCGGU
GCU*mU*mU*mU
sgRNA CR001137 #3:
(SEQ ID NO: 1773)
mG*mU*mA*AGCAUUUAAGUGGCUACGUUUUAGAGCUAGAAAUAGCAAGU
UAAAAUAAGGCUAGUCCGUUAUCAACUUGAAAAAGUGGCACCGAGUCGGU
GCmU*mU*mU*U
dgRNA CR001137 #1:
(SEQ ID NO: 389)
crRNA: GUAAGCAUUUAAGUGGCUACGUUUUAGAGCUAUGCUGUUUUG
tracr:
(SEQ ID NO: 6660)
AACAGCAUAGCAAGUUAAAAUAAGGCUAGUCCGUUAUCAACUUGAAAAAG
UGGCACCGAGUCGGUGCUUUUUUU
dgRNA CR001137 #2:
crRNA:
(SEQ ID NO: 390)
mG*mU*mA*AGCAUUUAAGUGGCUACGUUUUAGAGCUAUGCUGUU*mU*m
U*mG
tracr:
(SEQ ID NO: 346)
mA*mA*mC*AGCAUAGCAAGUUAAAAUAAGGCUAGUCCGUUAUCAACUUG
AAAAAGUG
GCACCGAGUCGGUGCUUUU*mU*mU*mU
dgRNA CR001137 #3:
crRNA:
(SEQ ID NO: 390)
mG*mU*mA*AGCAUUUAAGUGGCUACGUUUUAGAGCUAUGCUGUU*mU*m
U*mG
tracr:
(SEQ ID NO: 6660)
AACAGCAUAGCAAGUUAAAAUAAGGCUAGUCCGUUAUCAACUUGAAAAAG
UGGCACCGAGUCGGUGCUUUUUUU.

[0495] In aspects of the invention, a gRNA comprising the targeting domain of CR003035 (SEQ ID NO: 1505, underlined below), e.g., one of the gRNA molecules described below, is useful in the CRISPR systems, methods, cells and other aspects and embodiments of the invention, including in aspects involving more than one gRNA molecule, e.g., described herein:

sgRNA CR003035 #1:
(SEQ ID NO: 391)
AGGCACCUCAGACUCAGCAUGUUUUAGAGCUAGAAAUAGCAAGUUAAAAU
AAGGCUAGUCCGUUAUCAACUUGAAAAAGUGGCACCGAGUCGGUGCUUUU
sgRNA CR003035 #2:
(SEQ ID NO: 392)
mA*mG*mG*CACCUCAGACUCAGCAGUUUUAGAGCUAGAAAUAGCAAGU
UAAAAUAAGGCUAGUCCGUUAUCAACUUGAAAAAGUGGCACCGAGUCGGU
GCU*mU*mU*mU
sgRNA CR003035 #3:
(SEQ ID NO: 1774)
mA*mG*mG*CACCUCAGACUCAGCAUGUUUUAGAGCUAGAAAUAGCAAGU
UAAAAUAAGGCUAGUCCGUUAUCAACUUGAAAAAGUGGCACCGAGUCGGU
GCmU*mU*mU*U
dgRNA CR003035 #1:
(SEQ ID NO: 393)
crRNA: AGGCACCUCAGACUCAGCAUGUUUUAGAGCUAUGCUGUUUUG
tracr:
(SEQ ID NO: 6660)
AACAGCAUAGCAAGUUAAAAUAAGGCUAGUCCGUUAUCAACUUGAAAAAG
UGGCACCGAGUCGGUGCUUUUUUU
dgRNA CR003035 #2:
(SEQ ID NO: 394)
crRNA: mA*mG*mG*CACCUCAGACUCAGCAUGUUUUAGAGCUAUGCUG
UU*mU*mU*mG
tracr:
(SEQ ID NO: 346)
mA*mA*mC*AGCAUAGCAAGUUAAAAUAAGGCUAGUCCGUUAUCAACUUG
AAAAAGUGGCACCGAGUCGGUGCUUUU*mU*mU*mU
dgRNA CR003035 #3:
(SEQ ID NO: 394)
crRNA: mA*mG*mG*CACCUCAGACUCAGCAUGUUUUAGAGCUAUGCUG
UU*mU*mU*mG
tracr:
(SEQ ID NO: 6660)
AACAGCAUAGCAAGUUAAAAUAAGGCUAGUCCGUUAUCAACUUGAAAAAG
UGGCACCGAGUCGGUGCUUUUUUU.

[0496] In aspects of the invention, a gRNA comprising the targeting domain of CR003085 (SEQ ID NO: 1750, underlined below), e.g., one of the gRNA molecules described below, is useful in the CRISPR systems, methods, cells and other aspects and embodiments of the invention, including in aspects involving more than one gRNA molecule, e.g., described herein:

sgRNA CR003085 #1:
(SEQ ID NO: 395)
AUGGUAUGGGAGGUAUACUAGUUUUAGAGCUAGAAAUAGCAAGUUAAAAU
AAGGCUAGUCCGUUAUCAACUUGAAAAAGUGGCACCGAGUCGGUGCUUUU
sgRNA CR003085 #2:
(SEQ ID NO: 396)
mA*mU*mG*GUAUGGGAGGUAUACUAGUUUUAGAGCUAGAAAUAGCAAGU
UAAAAUAAGGCUAGUCCGUUAUCAACUUGAAAAAGUGGCACCGAGUCGGU
GCU*mU*mU*mU
sgRNA CR003085 #3:
(SEQ ID NO: 1775)
mA*mU*mG*GUAUGGGAGGUAUACUAGUUUUAGAGCUAGAAAUAGCAAGU
UAAAAUAAGGCUAGUCCGUUAUCAACUUGAAAAAGUGGCACCGAGUCGGU
GCmU*mU*mU*U
dgRNA CR003085 #1:
(SEQ ID NO: 397)
crRNA: AUGGUAUGGGAGGUAUACUAGUUUUAGAGCUAUGCUGUUUUG
tracr:
(SEQ ID NO: 6660)
AACAGCAUAGCAAGUUAAAAUAAGGCUAGUCCGUUAUCAACUUGAAAAAG
UGGCACCGAGUCGGUGCUUUUUUU
dgRNA CR003085 #2:
crRNA:
(SEQ ID NO: 398)
mA*mU*mG*GUAUGGGAGGUAUACUAGUUUUAGAGCUAUGCUGUU*mU*m
U*mG
tracr:
(SEQ ID NO: 346)
mA*mA*mC*AGCAUAGCAAGUUAAAAUAAGGCUAGUCCGUUAUCAACUUG
AAAAAGUGGCACCGAGUCGGUGCUUUU*mU*mU*mU
dgRNA CR003085 #3:
crRNA:
(SEQ ID NO: 398)
mA*mU*mG*GUAUGGGAGGUAUACUAGUUUUAGAGCUAUGCUGUU*mU*m
U*mG
tracr:
(SEQ ID NO: 6660)
AACAGCAUAGCAAGUUAAAAUAAGGCUAGUCCGUUAUCAACUUGAAAAAG
UGGCACCGAGUCGGUGCUUUUUUU.

[0497] In each of the gRNA molecules described above, a “*” denotes a phosphorothioate bond between the adjacent nucleotides, and “mN” (where N=A, G, C or U) denotes a 2′-OMe modified nucleotide. In embodiments, any of the gRNA molecules described herein, e.g., described above, is complexed with a Cas9 molecule, e.g., as described herein, to form a ribonuclear protein complex (RNP). Such RNPs are particularly useful in the methods, cells, and other aspects and embodiments of the invention, e.g., described herein.

[0498] IV. Cas Molecules

[0499] Cas9 Molecules

[0500] In preferred embodiments, the Cas molecule is a Cas9 molecule. Cas9 molecules of a variety of species can be used in the methods and compositions described herein. While the S. pyogenes Cas9 molecule are the subject of much of the disclosure herein, Cas9 molecules of, derived from, or based on the Cas9 proteins of other species listed herein can be used as well. In other words, other Cas9 molecules, e.g., S. thermophilus, Staphylococcus aureus and/or Neisseria meningitidis Cas9 molecules, may be used in the systems, methods and compositions described herein. Additional Cas9 species include: Acidovorax avenae, Actinobacillus pleuropneumoniae, Actinobacillus succinogenes, Actinobacillus suis, Actinomyces sp., cycliphilus denitrificans, Aminomonas paucivorans, Bacillus cereus, Bacillus smithii, Bacillus thuringiensis, Bacteroides sp., Blastopirellula marina, Bradyrhiz obium sp., Brevibacillus latemsporus, Campylobacter coli, Campylobacter jejuni, Campylobacter lad, Candidatus Puniceispirillum, Clostridiu cellulolyticum, Clostridium perfringens, Corynebacterium accolens, Corynebacterium diphtheria, Corynebacterium matruchotii, Dinoroseobacter sliibae, Eubacterium dolichum, Gamma proteobacterium, Gluconacetobacler diazotrophicus, Haemophilus parainfluenzae, Haemophilus sputorum, Helicobacter canadensis, Helicobacter cinaedi, Helicobacter mustelae, Ilyobacler polytropus, Kingella kingae, Lactobacillus crispatus, Listeria ivanovii, Listeria monocytogenes, Listeriaceae bacterium, Methylocystis sp., Methylosinus trichosporium, Mobiluncus mulieris, Neisseria bacilliformis, Neisseria cinerea, Neisseria flavescens, Neisseria lactamica. Neisseria sp., Neisseria wadsworthii, Nitrosomonas sp., Parvibaculum lavamentivorans, Pasteurella multocida, Phascolarctobacterium succinatutens, Ralstonia syzygii, Rhodopseudomonas palustris, Rhodovulum sp., Simonsiella muelleri, Sphingomonas sp., Sporolactobacillus vineae, Staphylococcus lugdunensis, Streptococcus sp., Subdoligranulum sp., Tislrella mobilis, Treponema sp., or Verminephrobacter eiseniae.

[0501] A Cas9 molecule, as that term is used herein, refers to a molecule that can interact with a gRNA molecule (e.g., sequence of a domain of a tracr) and, in concert with the gRNA molecule, localize (e.g., target or home) to a site which comprises a target sequence and PAM sequence.

[0502] In an embodiment, the Cas9 molecule is capable of cleaving a target nucleic acid molecule, which may be referred to herein as an active Cas9 molecule. In an embodiment, an active Cas9 molecule, comprises one or more of the following activities: a nickase activity, i.e., the ability to cleave a single strand, e.g., the non-complementary strand or the complementary strand, of a nucleic acid molecule; a double stranded nuclease activity, i.e., the ability to cleave both strands of a double stranded nucleic acid and create a double stranded break, which in an embodiment is the presence of two nickase activities; an endonuclease activity; an exonuclease activity; and a helicase activity, i.e., the ability to unwind the helical structure of a double stranded nucleic acid.

[0503] In an embodiment, an enzymatically active Cas9 molecule cleaves both DNA strands and results in a double stranded break. In an embodiment, a Cas9 molecule cleaves only one strand, e.g., the strand to which the gRNA hybridizes to, or the strand complementary to the strand the gRNA hybridizes with. In an embodiment, an active Cas9 molecule comprises cleavage activity associated with an HNH-like domain. In an embodiment, an active Cas9 molecule comprises cleavage activity associated with an N-terminal RuvC-like domain. In an embodiment, an active Cas9 molecule comprises cleavage activity associated with an HNH-like domain and cleavage activity associated with an N-terminal RuvC-like domain. In an embodiment, an active Cas9 molecule comprises an active, or cleavage competent, HNH-like domain and an inactive, or cleavage incompetent, N-terminal RuvC-like domain. In an embodiment, an active Cas9 molecule comprises an inactive, or cleavage incompetent, HNH-like domain and an active, or cleavage competent, N-terminal RuvC-like domain.

[0504] In an embodiment, the ability of an active Cas9 molecule to interact with and cleave a target nucleic acid is PAM sequence dependent. A PAM sequence is a sequence in the target nucleic acid. In an embodiment, cleavage of the target nucleic acid occurs upstream from the PAM sequence. Active Cas9 molecules from different bacterial species can recognize different sequence motifs (e.g., PAM sequences). In an embodiment, an active Cas9 molecule of S. pyogenes recognizes the sequence motif NGG and directs cleavage of a target nucleic acid sequence 1 to 10, e.g., 3 to 5, base pairs upstream from that sequence. See, e.g., Mali el ai, SCIENCE 2013; 339(6121): 823-826. In an embodiment, an active Cas9 molecule of S. thermophilus recognizes the sequence motif NGGNG and NNAG AAW (W=A or T) and directs cleavage of a core target nucleic acid sequence 1 to 10, e.g., 3 to 5, base pairs upstream from these sequences. See, e.g., Horvath et al., SCIENCE 2010; 327(5962): 167-170, and Deveau et al, J BACTERIOL 2008; 190(4): 1390-1400. In an embodiment, an active Cas9 molecule of S. mulans recognizes the sequence motif NGG or NAAR (R-A or G) and directs cleavage of a core target nucleic acid sequence 1 to 10, e.g., 3 to 5 base pairs, upstream from this sequence. See, e.g., Deveau et al., J BACTERIOL 2008; 190(4): 1 390-1400.

[0505] In an embodiment, an active Cas9 molecule of S. aureus recognizes the sequence motif NNGRR (R=A or G) and directs cleavage of a target nucleic acid sequence 1 to 10, e.g., 3 to 5, base pairs upstream from that sequence. See, e.g., Ran F. et al., NATURE, vol. 520, 2015, pp. 186-191. In an embodiment, an active Cas9 molecule of N. meningitidis recognizes the sequence motif NNNNGATT and directs cleavage of a target nucleic acid sequence 1 to 10, e.g., 3 to 5, base pairs upstream from that sequence. See, e.g., Hou et al., PNAS EARLY EDITION 2013, 1-6. The ability of a Cas9 molecule to recognize a PAM sequence can be determined, e.g., using a transformation assay described in Jinek et al, SCIENCE 2012, 337:816.

[0506] Some Cas9 molecules have the ability to interact with a gRNA molecule, and in conjunction with the gRNA molecule home (e.g., targeted or localized) to a core target domain, but are incapable of cleaving the target nucleic acid, or incapable of cleaving at efficient rates. Cas9 molecules having no, or no substantial, cleavage activity may be referred to herein as an inactive Cas9 (an enzymatically inactive Cas9), a dead Cas9, or a dCas9 molecule. For example, an inactive Cas9 molecule can lack cleavage activity or have substantially less, e.g., less than 20, 10, 5, 1 or 0.1% of the cleavage activity of a reference Cas9 molecule, as measured by an assay described herein.

[0507] Exemplary naturally occurring Cas9 molecules are described in Chylinski et al, RNA Biology 2013; 10:5, 727-737. Such Cas9 molecules include Cas9 molecules of a cluster 1 bacterial family, cluster 2 bacterial family, cluster 3 bacterial family, cluster 4 bacterial family, cluster 5 bacterial family, cluster 6 bacterial family, a cluster 7 bacterial family, a cluster 8 bacterial family, a cluster 9 bacterial family, a cluster 10 bacterial family, a cluster 11 bacterial family, a cluster 12 bacterial family, a cluster 13 bacterial family, a cluster 14 bacterial family, a cluster 1 bacterial family, a cluster 16 bacterial family, a cluster 17 bacterial family, a cluster 18 bacterial family, a cluster 19 bacterial family, a cluster 20 bacterial family, a cluster 21 bacterial family, a cluster 22 bacterial family, a cluster 23 bacterial family, a cluster 24 bacterial family, a cluster 25 bacterial family, a cluster 26 bacterial family, a cluster 27 bacterial family, a cluster 28 bacterial family, a cluster 29 bacterial family, a cluster 30 bacterial family, a cluster 31 bacterial family, a cluster 32 bacterial family, a cluster 33 bacterial family, a cluster 34 bacterial family, a cluster 35 bacterial family, a cluster 36 bacterial family, a cluster 37 bacterial family, a cluster 38 bacterial family, a cluster 39 bacterial family, a cluster 40 bacterial family, a cluster 41 bacterial family, a cluster 42 bacterial family, a cluster 43 bacterial family, a cluster 44 bacterial family, a cluster 45 bacterial family, a cluster 46 bacterial family, a cluster 47 bacterial family, a cluster 48 bacterial family, a cluster 49 bacterial family, a cluster 50 bacterial family, a cluster 51 bacterial family, a cluster 52 bacterial family, a cluster 53 bacterial family, a cluster 54 bacterial family, a cluster 55 bacterial family, a cluster 56 bacterial family, a cluster 57 bacterial family, a cluster 58 bacterial family, a cluster 59 bacterial family, a cluster 60 bacterial family, a cluster 61 bacterial family, a cluster 62 bacterial family, a cluster 63 bacterial family, a cluster 64 bacterial family, a cluster 65 bacterial family, a cluster 66 bacterial family, a cluster 67 bacterial family, a cluster 68 bacterial family, a cluster 69 bacterial family, a cluster 70 bacterial family, a cluster 71 bacterial family, a cluster 72 bacterial family, a cluster 73 bacterial family, a cluster 74 bacterial family, a cluster 75 bacterial family, a cluster 76 bacterial family, a cluster 77 bacterial family, or a cluster 78 bacterial family.

[0508] Exemplary naturally occurring Cas9 molecules include a Cas9 molecule of a cluster 1 bacterial family. Examples include a Cas9 molecule of: S. pyogenes (e.g., strain SF370, MGAS 10270, MGAS 10750, MGAS2096, MGAS315, MGAS5005, MGAS6180, MGAS9429, NZ131 and SSI-1), S. thermophilus (e.g., strain LMD-9), S. pseudoporcinus (e.g., strain SPIN 20026), S. mutans (e.g., strain UA 159, NN2025), S. macacae (e.g., strain NCTC1 1558), S. gallolylicus (e.g., strain UCN34, ATCC BAA-2069), S. equines (e.g., strain ATCC 9812, MGCS 124), S. dysdalactiae (e.g., strain GGS 124), S. bovis (e.g., strain ATCC 700338), S. cmginosus (e.g.; strain F0211), S. agalactia* (e.g., strain NEM316, A909), Listeria monocytogenes (e.g., strain F6854), Listeria innocua (L. innocua, e.g., strain Clip 11262), Enterococcus italicus (e.g., strain DSM 15952), or Enterococcus faecium (e.g., strain 1,231,408). Additional exemplary Cas9 molecules are a Cas9 molecule of Neisseria meningitidis (Hou et′al. PNAS Early Edition 2013, 1-6) and a S. aureus Cas9 molecule.

[0509] In an embodiment, a Cas9 molecule, e.g., an active Cas9 molecule or inactive Cas9 molecule, comprises an amino acid sequence: having 60%, 65%, 70%, 75%, 80%, 85%, 90%, 95%, 96%, 97%, 98%, or 99% homology with; differs at no more than 1%, 2%, 5%, 10%, 15%, 20%, 30%, or 40% of the amino acid residues when compared with; differs by at least 1, 2, 5, 10 or 20 amino acids but by no more than 100, 80, 70, 60, 50, 40 or 30 amino acids from; or is identical to; any Cas9 molecule sequence described herein or a naturally occurring Cas9 molecule sequence, e.g., a Cas9 molecule from a species listed herein or described in Chylinski et al., RNA Biology 2013, 10:5, T2T-T,1 Hou et al. PNAS Early Edition 2013, 1-6.

[0510] In an embodiment, a Cas9 molecule comprises an amino acid sequence having 60%, 65%, 70%, 75%, 80%, 85%, 90%, 95%, 96%, 97%, 98%, or 99% homology with; differs at no more than 1%, 2%, 5%, 10%, 15%, 20%, 30%, or 40% of the amino acid residues when compared with; differs by at least 1, 2, 5, 10 or 20 amino acids but by no more than 100, 80, 70, 60, 50, 40 or 30 amino acids from; or is identical to; S. pyogenes Cas9:

```
(SEQ ID NO: 6611)
[sequence omitted]
                                1365
```

[0511] In embodiments, the Cas9 molecule is a S. pyogenes Cas9 variant of SEQ ID NO: 6611 that includes one or more mutations to positively charged amino acids (e.g., lysine, arginine or histidine) that introduce an uncharged or nonpolar amino acid, e.g., alanine, at said position. In embodiments, the mutation is to one or more positively charged amino acids in the nt-groove of Cas9. In embodiments, the Cas9 molecule is a S. pyogenes Cas9 variant of SEQ ID NO: 6611 that includes a mutilation at position 855 of SEQ ID NO: 6611, for example a mutation to an uncharged amino acid, e.g., alanine, at position 855 of SEQ ID NO: 6611. In embodiments, the Cas9 molecule has a mutation only at position 855 of SEQ ID NO: 6611, relative to SEQ ID NO: 6611, e.g., to an uncharged amino acid, e.g., alanine. In embodiments, the Cas9 molecule is a S. pyogenes Cas9 variant of SEQ ID NO: 6611 that includes a mutilation at position 810, a mutation at position 1003, and/or a mutation at position 1060 of SEQ ID NO: 6611, for example a mutation to alanine at position 810, position 1003, and/or position 1060 of SEQ ID NO: 6611. In embodiments, the Cas9 molecule has a mutation only at position 810, position 1003, and position 1060 of SEQ ID NO: 6611, relative to SEQ ID NO: 6611, e.g., where each mutation is to an uncharged amino acid, for example, alanine. In embodiments, the Cas9 molecule is a S. pyogenes Cas9 variant of SEQ ID NO: 6611 that includes a mutilation at position 848, a mutation at position 1003, and/or a mutation at position 1060 of SEQ ID NO: 6611, for example a mutation to alanine at position 848, position 1003, and/or position 1060 of SEQ ID NO: 6611. In embodiments, the Cas9 molecule has a mutation only at position 848, position 1003, and position 1060 of SEQ ID NO: 6611, relative to SEQ ID NO: 6611, e.g., where each mutation is to an uncharged amino acid, for example, alanine. In embodiments, the Cas9 molecule is a Cas9 molecule as described in Slaymaker et al., Science Express, available online Dec. 1, 2015 at Science DOI: 10.1126/science.aad5227.

[0512] In embodiments, the Cas9 molecule is a S. pyogenes Cas9 variant of SEQ ID NO: 6611 that includes one or more mutations. In embodiments, the Cas9 variant comprises a mutation at position 80 of SEQ ID NO: 6611, e.g., includes a leucine at position 80 of SEQ ID NO: 6611 (i.e., comprises, e.g., consists of, SEQ ID NO: 6611 with a C80L mutation). In embodiments, the Cas9 variant comprises a mutation at position 574 of SEQ ID NO: 6611, e.g., includes a glutamic acid at position 574 of SEQ ID NO: 6611 (i.e., comprises, e.g., consists of, SEQ ID NO: 6611 with a C574E mutation). In embodiments, the Cas9 variant comprises a mutation at position 80 and a mutation at position 574 of SEQ ID NO: 6611, e.g., includes a leucine at position 80 of SEQ ID NO: 6611, and a glutamic acid at position 574 of SEQ ID NO: 6611 (i.e., comprises, e.g., consists of, SEQ ID NO: 6611 with a C80L mutation and a C574E mutation). Without being bound by theory, it is believed that such mutations improve the solution properties of the Cas9 molecule.

[0513] In embodiments, the Cas9 molecule is a S. pyogenes Cas9 variant of SEQ ID NO: 6611 that includes one or more mutations. In embodiments, the Cas9 variant comprises a mutation at position 147 of SEQ ID NO: 6611, e.g., includes a tyrosine at position 147 of SEQ ID NO: 6611 (i.e., comprises, e.g., consists of, SEQ ID NO: 6611 with a D147Y mutation). In embodiments, the Cas9 variant comprises a mutation at position 411 of SEQ ID NO: 6611, e.g., includes a threonine at position 411 of SEQ ID NO: 6611 (i.e., comprises, e.g., consists of, SEQ ID NO: 6611 with a P411T mutation). In embodiments, the Cas9 variant comprises a mutation at position 147 and a mutation at position 411 of SEQ ID NO: 6611, e.g., includes a tyrosine at position 147 of SEQ ID NO: 6611, and a threonine at position 411 of SEQ ID NO: 6611 (i.e., comprises, e.g., consists of, SEQ ID NO: 6611 with a D147Y mutation and a P411T mutation). Without being bound by theory, it is believed that such mutations improve the targeting efficiency of the Cas9 molecule, e.g., in yeast.

[0514] In embodiments, the Cas9 molecule is a S. pyogenes Cas9 variant of SEQ ID NO: 6611 that includes one or more mutations. In embodiments, the Cas9 variant comprises a mutation at position 1135 of SEQ ID NO: 6611, e.g., includes a glutamic acid at position 1135 of SEQ ID NO: 6611 (i.e., comprises, e.g., consists of, SEQ ID NO: 6611 with a D1135E mutation). Without being bound by theory, it is believed that such mutations improve the selectivity of the Cas9 molecule for the NGG PAM sequence versus the NAG PAM sequence.

[0515] In embodiments, the Cas9 molecule is a S. pyogenes Cas9 variant of SEQ ID NO: 6611 that includes one or more mutations that introduce an uncharged or nonpolar amino acid, e.g., alanine, at certain positions. In embodiments, the Cas9 molecule is a S. pyogenes Cas9 variant of SEQ ID NO: 6611 that includes a mutilation at position 497, a mutation at position 661, a mutation at position 695 and/or a mutation at position 926 of SEQ ID NO: 6611, for example a mutation to alanine at position 497, position 661, position 695 and/or position 926 of SEQ ID NO: 6611. In embodiments, the Cas9 molecule has a mutation only at position 497, position 661, position 695, and position 926 of SEQ ID NO: 6611, relative to SEQ ID NO: 6611, e.g., where each mutation is to an uncharged amino acid, for example, alanine.

[0516] Without being bound by theory, it is believed that such mutations reduce the cutting by the Cas9 molecule at off-target sites

[0517] It will be understood that the mutations described herein to the Cas9 molecule may be combined, and may be combined with any of the fusions or other modifications described herein, and the Cas9 molecule tested in the assays described herein.

[0518] Various types of Cas molecules can be used to practice the inventions disclosed herein. In some embodiments, Cas molecules of Type II Cas systems are used. In other embodiments, Cas molecules of other Cas systems are used. For example, Type I or Type III Cas molecules may be used. Exemplary Cas molecules (and Cas systems) are described, e.g., in Haft et ai, PLoS COMPUTATIONAL BIOLOGY 2005, 1(6): e60 and Makarova et al, NATURE REVIEW MICROBIOLOGY 201 1, 9:467-477, the contents of both references are incorporated herein by reference in their entirety.

[0519] In an embodiment, the Cas9 molecule comprises one or more of the following activities: a nickase activity; a double stranded cleavage activity (e.g., an endonuclease and/or exonuclease activity); a helicase activity; or the ability, together with a gRNA molecule, to localize to a target nucleic acid.

[0520] Altered Cas9 Molecules

[0521] Naturally occurring Cas9 molecules possess a number of properties, including: nickase activity, nuclease activity (e.g., endonuclease and/or exonuclease activity); helicase activity; the ability to associate functionally with a gRNA molecule; and the ability to target (or localize to) a site on a nucleic acid (e.g., PAM recognition and specificity). In an embodiment, a Cas9 molecules can include all or a subset of these properties. In typical embodiments, Cas9 molecules have the ability to interact with a gRNA molecule and, in concert with the gRNA molecule, localize to a site in a nucleic acid. Other activities, e.g., PAM specificity, cleavage activity, or helicase activity can vary more widely in Cas9 molecules.

[0522] Cas9 molecules with desired properties can be made in a number of ways, e.g., by alteration of a parental, e.g., naturally occurring Cas9 molecules to provide an altered Cas9 molecule having a desired property. For example, one or more mutations or differences relative to a parental Cas9 molecule can be introduced. Such mutations and differences comprise: substitutions (e.g., conservative substitutions or substitutions of non-essential amino acids); insertions; or deletions. In an embodiment, a Cas9 molecule can comprises one or more mutations or differences, e.g., at least 1, 2, 3, 4, 5, 10, 15, 20, 30, 40 or 50 mutations but less than 200, 100, or 80 mutations relative to a reference Cas9 molecule.

[0523] In an embodiment, a mutation or mutations do not have a substantial effect on a Cas9 activity, e.g. a Cas9 activity described herein. In an embodiment, a mutation or mutations have a substantial effect on a Cas9 activity, e.g. a Cas9 activity described herein. In an embodiment, exemplary activities comprise one or more of PAM specificity, cleavage activity, and helicase activity. A mutation(s) can be present, e.g., in: one or more RuvC-like domain, e.g., an N-terminal RuvC-like domain; an HNH-like domain; a region outside the RuvC-like domains and the HNH-like domain. In some embodiments, a mutation(s) is present in an N-terminal RuvC-like domain. In some embodiments, a mutation(s) is present in an HNH-like domain. In some embodiments, mutations are present in both an N-terminal RuvC-like domain and an HNH-like domain.

[0524] Whether or not a particular sequence, e.g., a substitution, may affect one or more activity, such as targeting activity, cleavage activity, etc, can be evaluated or predicted, e.g., by evaluating whether the mutation is conservative or by the method described in Section III. In an embodiment, a “non-essential” amino acid residue, as used in the context of a Cas9 molecule, is a residue that can be altered from the wild-type sequence of a Cas9 molecule, e.g., a naturally occurring Cas9 molecule, e.g., an active Cas9 molecule, without abolishing or more preferably, without substantially altering a Cas9 activity (e.g., cleavage activity), whereas changing an “essential” amino acid residue results in a substantial loss of activity (e.g., cleavage activity).

[0525] Cas9 Molecules with Altered PAM Recognition or No PAM Recognition

[0526] Naturally occurring Cas9 molecules can recognize specific PAM sequences, for example the PAM recognition sequences described above for S. pyogenes, S. thermophilus, S. mutans, S. aureus and N. meningitidis.

[0527] In an embodiment, a Cas9 molecule has the same PAM specificities as a naturally occurring Cas9 molecule. In other embodiments, a Cas9 molecule has a PAM specificity not associated with a naturally occurring Cas9 molecule, or a PAM specificity not associated with the naturally occurring Cas9 molecule to which it has the closest sequence homology. For example, a naturally occurring Cas9 molecule can be altered, e.g., to alter PAM recognition, e.g., to alter the PAM sequence that the Cas9 molecule recognizes to decrease off target sites and/or improve specificity; or eliminate a PAM recognition requirement. In an embodiment, a Cas9 molecule can be altered, e.g., to increase length of PAM recognition sequence and/or improve Cas9 specificity to high level of identity to decrease off target sites and increase specificity. In an embodiment, the length of the PAM recognition sequence is at least 4, 5, 6, 7, 8, 9, 10 or 15 amino acids in length. Cas9 molecules that recognize different PAM sequences and/or have reduced off-target activity can be generated using directed evolution. Exemplary methods and systems that can be used for directed evolution of Cas9 molecules are described, e.g., in Esvelt el al, Nature 2011, 472(7344): 499-503. Candidate Cas9 molecules can be evaluated, e.g., by methods described herein.

[0528] Non-Cleaving and Modified-Cleavage Cas9 Molecules

[0529] In an embodiment, a Cas9 molecule comprises a cleavage property that differs from naturally occurring Cas9 molecules, e.g., that differs from the naturally occurring Cas9 molecule having the closest homology. For example, a Cas9 molecule can differ from naturally occurring Cas9 molecules, e.g., a Cas9 molecule of S. pyogenes, as follows: its ability to modulate, e.g., decreased or increased, cleavage of a double stranded break (endonuclease and/or exonuclease activity), e.g., as compared to a naturally occurring Cas9 molecule (e.g., a Cas9 molecule of S. pyogenes); its ability to modulate, e.g., decreased or increased, cleavage of a single strand of a nucleic acid, e.g., a non-complimentary strand of a nucleic acid molecule or a complementary strand of a nucleic acid molecule (nickase activity), e.g., as compared to a naturally occurring Cas9 molecule (e.g., a Cas9 molecule of S. pyogenes); or the ability to cleave a nucleic acid molecule, e.g., a double stranded or single stranded nucleic acid molecule, can be eliminated.

[0530] Modified Cleavage active Cas9 Molecules

[0531] In an embodiment, an active Cas9 molecule comprises one or more of the following activities: cleavage activity associated with an N-terminal RuvC-like domain; cleavage activity associated with an HNH-like domain; cleavage activity associated with an HNH domain and cleavage activity associated with an N-terminal RuvC-like domain.

[0532] In an embodiment, the Cas9 molecule is a Cas9 nickase, e.g., cleaves only a single strand of DNA. In an embodiment, the Cas9 nickase includes a mutation at position 10 and/or a mutation at position 840 of SEQ ID NO: 6611, e.g., comprises a D10A and/or H840A mutation to SEQ ID NO: 6611.

[0533] Non-Cleaving inactive Cas9 Molecules

[0534] In an embodiment, the altered Cas9 molecule is an inactive Cas9 molecule which does not cleave a nucleic acid molecule (either double stranded or single stranded nucleic acid molecules) or cleaves a nucleic acid molecule with significantly less efficiency, e.g., less than 20, 10, 5, 1 or 0.1% of the cleavage activity of a reference Cas9 molecule, e.g., as measured by an assay described herein. The reference Cas9 molecule can by a naturally occurring unmodified Cas9 molecule, e.g., a naturally occurring Cas9 molecule such as a Cas9 molecule of S. pyogenes, S. thermophilus, S. aureus or N. meningitidis. In an embodiment, the reference Cas9 molecule is the naturally occurring Cas9 molecule having the closest sequence identity or homology. In an embodiment, the inactive Cas9 molecule lacks substantial cleavage activity associated with an N-terminal RuvC-like domain and cleavage activity associated with an HNH-like domain.

[0535] In an embodiment, the Cas9 molecule is dCas9. Tsai et al. (2014), Nat. Biotech. 32:569-577.

[0536] A catalytically inactive Cas9 molecule may be fused with a transcription repressor. An inactive Cas9 fusion protein complexes with a gRNA and localizes to a DNA sequence specified by gRNA's targeting domain, but, unlike an active Cas9, it will not cleave the target DNA. Fusion of an effector domain, such as a transcriptional repression domain, to an inactive Cas9 enables recruitment of the effector to any DNA site specified by the gRNA. Site specific targeting of a Cas9 fusion protein to a promoter region of a gene can block or affect polymerase binding to the promoter region, for example, a Cas9 fusion with a transcription factor (e.g., a transcription activator) and/or a transcriptional enhancer binding to the nucleic acid to increase or inhibit transcription activation. Alternatively, site specific targeting of a a Cas9-fusion to a transcription repressor to a promoter region of a gene can be used to decrease transcription activation.

[0537] Transcription repressors or transcription repressor domains that may be fused to an inactive Cas9 molecule can include ruppel associated box (KRAB or SKD), the Mad mSIN3 interaction domain (SID) or the ERF repressor domain (ERD).

[0538] In another embodiment, an inactive Cas9 molecule may be fused with a protein that modifies chromatin. For example, an inactive Cas9 molecule may be fused to heterochromatin protein 1 (HP1), a histone lysine methyltransferase (e.g., SUV39H 1, SUV39H2, G9A, ESET/SETDB 1, Pr-SET7/8, SUV4-20H 1,RIZ1), a histone lysine demethylates (e.g., LSD1/BHC1 10, SpLsdl/Sw, 1/Safl 10, Su(var)3-3, JMJD2A/JHDM3A, JMJD2B, JMJD2C/GASC1, JMJD2D, Rph 1, JARID 1 A/RBP2, JARI DIB/PLU-I, JAR1D 1C/SMCX, JARID1 D/SMCY, Lid, Jhn2, Jmj2), a histone lysine deacetylases (e.g., HDAC1, HDAC2, HDAC3, HDAC8, Rpd3, Hos 1, Cir6, HDAC4, HDAC5, HDAC7, HDAC9, Hdal, Cir3, SIRT 1, SIRT2, Sir2, Hst 1, Hst2, Hst3, Hst4, HDAC 11) and a DNA methylases (DNMT1,DNMT2a/DMNT3b, MET1). An inactive Cas9-chomatin modifying molecule fusion protein can be used to alter chromatin status to reduce expression a target gene.

[0539] The heterologous sequence (e.g., the transcription repressor domain) may be fused to the N- or C-terminus of the inactive Cas9 protein. In an alternative embodiment, the heterologous sequence (e.g., the transcription repressor domain) may be fused to an internal portion (i.e., a portion other than the N-terminus or C-terminus) of the inactive Cas9 protein.

[0540] The ability of a Cas9 molecule/gRNA molecule complex to bind to and cleave a target nucleic acid can be evaluated, e.g., by the methods described herein in Section III. The activity of a Cas9 molecule, e.g., either an active Cas9 or a inactive Cas9, alone or in a complex with a gRNA molecule may also be evaluated by methods well-known in the art, including, gene expression assays and chromatin-based assays, e.g., chromatin immunoprecipitation (ChiP) and chromatin in vivo assay (CiA).

[0541] Other Cas9 Molecule Fusions

[0542] In embodiments, the Cas9 molecule, e.g, a Cas9 of S. pyogenes, may additionally comprise one or more amino acid sequences that confer additional activity.

[0543] In some aspects, the Cas9 molecule may comprise one or more nuclear localization sequences (NLSs), such as at least 1, 2, 3, 4, 5, 6, 7, 8, 9, 10, or more NLSs. In some embodiments, the Cas9 molecule comprises at least 1, 2, 3, 4, 5, 6, 7, 8, 9, 10, or more NLSs at or near the amino-terminus, at least 1, 2, 3, 4, 5, 6, 7, 8, 9, 10, or more NLSs at or near the carboxy-terminus, or a combination of these (e.g. one or more NLS at the amino-terminus and one or more NLS at the carboxy terminus). When more than one NLS is present, each may be selected independently of the others, such that a single NLS may be present in more than one copy and/or in combination with one or more other NLSs present in one or more copies. In some embodiments, an NLS is considered near the N- or C-terminus when the nearest amino acid of the NLS is within about 1, 2, 3, 4, 5, 10, 15, 20, 25, 30, 40, 50, or more amino acids along the polypeptide chain from the N- or C-terminus. Typically, an NLS consists of one or more short sequences of positively charged lysines or arginines exposed on the protein surface, but other types of NLS are known. Non-limiting examples of NLSs include an NLS sequence comprising or derived from: the NLS of the SV40 virus large T-antigen, having the amino acid sequence PKKKRKV (SEQ ID NO: 6612); the NLS from nucleoplasmin (e.g. the nucleoplasmin bipartite NLS with the sequence KRPAATKKAGQAKKKK (SEQ ID NO: 6613); the c-myc NLS having the amino acid sequence PAAKRVKLD (SEQ ID NO: 6614) or RQRRNELKRSP (SEQ ID NO: 6615); the hRNPA1 M9 NLS having the sequence NQSSNFGPMKGGNFGGRSSGPYGGGGQYFAKPRNQGGY (SEQ ID NO: 6616); the sequence RMRIZFKNKGKDTAELRRRRVEVSVELRKAKKDEQILKRRNV (SEQ ID NO: 6617) of the IBB domain from importin-alpha; the sequences VSRKRPRP (SEQ ID NO: 6618) and PPKKARED (SEQ ID NO: 6619) of the myoma T protein; the sequence PQPKKKPL (SEQ ID NO: 6620) of human p53; the sequence SALIKKKKKMAP (SEQ ID NO: 6621) of mouse c-abl IV; the sequences DRLRR (SEQ ID NO: 6622) and PKQKKRK (SEQ ID NO: 6623) of the influenza virus NS1; the sequence RKLKKKIKKL (SEQ ID NO: 6624) of the Hepatitis virus delta antigen; the sequence REKKKFLKRR (SEQ ID NO: 6625) of the mouse Mxl protein; the sequence KRKGDEVDGVDEVAKKKSKK (SEQ ID NO: 6626) of the human poly(ADP-ribose) polymerase; and the sequence RKCLQAGMNLEARKTKK (SEQ ID NO: 6627) of the steroid hormone receptors (human) glucocorticoid. Other suitable NLS sequences are known in the art (e.g., Sorokin, Biochemistry (Moscow) (2007) 72:13, 1439-1457; Lange J Biol Chem. (2007) 282:8, 5101-5).

[0544] In an embodiment, the Cas9 molecule, e.g., S. pyogenes Cas9 molecule, comprises a NLS sequence of SV40, e.g., disposed N terminal to the Cas9 molecule. In an embodiment, the Cas9 molecule, e.g., S. pyogenes Cas9 molecule, comprises a NLS sequence of SV40 disposed N-terminal to the Cas9 molecule and a NLS sequence of SV40 disposed C terminal to the Cas9 molecule. In an embodiment, the Cas9 molecule, e.g., S. pyogenes Cas9 molecule, comprises a NLS sequence of SV40 disposed N-terminal to the Cas9 molecule and a NLS sequence of nucleoplasmin disposed C-terminal to the Cas9 molecule. In any of the aforementioned embodiments, the molecule may additionally comprise a tag, e.g., a His tag, e.g., a His(6) tag (SEQ ID NO: 2969) or His(8) tag (SEQ ID NO: 2970), e.g., at the N terminus or the C terminus.

[0545] In some aspects, the Cas9 molecule may comprise one or more amino acid sequences that allow the Cas9 molecule to be specifically recognized, for example a tag. In one embodiment, the tag is a Histidine tag, e.g., a histidine tag comprising at least 3, 4, 5, 6, 7, 8, 9, 10 or more histidine amino acids (SEQ ID NO: 2971). In embodiments, the histidine tag is a His6 tag (six histidines (SEQ ID NO: 2969)). In other embodiments, the histidine tag is a His8 tag (eight histidines (SEQ ID NO: 2970)). In embodiments, the histidine tag may be separated from one or more other portions of the Cas9 molecule by a linker. In embodiments, the linker is GGS. An example of such a fusion is the Cas9 molecule iProt106520.

[0546] In some aspects, the Cas9 molecule may comprise one or more amino acid sequences that are recognized by a protease (e.g., comprise a protease cleavage site). In embodiments, the cleavage site is the tobacco etch virus (TEV) cleavage site, e.g., comprises the sequence ENLYFQG (SEQ ID NO: 7810). In some aspects the protease cleavage site, e.g., the TEV cleavage site is disposed between a tag, e.g., a His tag, e.g., a His6 (SEQ ID NO: 2969) or His8 tag (SEQ ID NO: 2970), and the remainder of the Cas9 molecule. Without being bound by theory it is believed that such introduction will allow for the use of the tag for, e.g., purification of the Cas9 molecule, and then subsequent cleavage so the tag does not interfere with the Cas9 molecule function.

[0547] In embodiments, the Cas9 molecule (e.g., a Cas9 molecule as described herein) comprises an N-terminal NLS, and a C-terminal NLS (e.g., comprises, from N- to C-terminal NLS-Cas9-NLS), e.g., wherein each NLS is an SV40 NLS (PKKKRKV (SEQ ID NO: 6612)). In embodiments, the Cas9 molecule (e.g., a Cas9 molecule as described herein) comprises an N-terminal NLS, a C-terminal NLS, and a C-terminal His6 tag (SEQ ID NO: 2969) (e.g., comprises, from N- to C-terminal NLS-Cas9-NLS-His tag), e.g., wherein each NLS is an SV40 NLS (PKKKRKV (SEQ ID NO: 6612)). In embodiments, the Cas9 molecule (e.g., a Cas9 molecule as described herein) comprises an N-terminal His tag (e.g., His6 tag (SEQ ID NO: 2969)), an N-terminal NLS, and a C-terminal NLS (e.g., comprises, from N- to C-terminal His tag-NLS-Cas9-NLS), e.g., wherein each NLS is an SV40 NLS (PKKKRKV (SEQ ID NO: 6612)). In embodiments, the Cas9 molecule (e.g., a Cas9 molecule as described herein) comprises an N-terminal NLS and a C-terminal His tag (e.g., His6 tag (SEQ ID NO: 2969)) (e.g., comprises from N- to C-terminal His tag-Cas9-NLS), e.g., wherein the NLS is an SV40 NLS (PKKKRKV (SEQ ID NO: 6612)). In embodiments, the Cas9 molecule (e.g., a Cas9 molecule as described herein) comprises an N-terminal NLS and a C-terminal His tag (e.g., His6 tag (SEQ ID NO: 2969)) (e.g., comprises from N- to C-terminal NLS-Cas9-His tag), e.g., wherein the NLS is an SV40 NLS (PKKKRKV (SEQ ID NO: 6612)). In embodiments, the Cas9 molecule (e.g., a Cas9 molecule as described herein) comprises an N-terminal His tag (e.g., His8 tag (SEQ ID NO: 2970)), an N-terminal cleavage domain (e.g., a tobacco etch virus (TEV) cleavage domain (e.g., comprises the sequence ENLYFQG (SEQ ID NO: 7810))), an N-terminal NLS (e.g., an SV40 NLS; SEQ ID NO: 6612), and a C-terminal NLS (e.g., an SV40 NLS; SEQ ID NO: 6612) (e.g., comprises from N- to C-terminal His tag-TEV-NLS-Cas9-NLS). In any of the aforementioned embodiments the Cas9 has the sequence of SEQ ID NO: 6611. Alternatively, in any of the aforementioned embodiments, the Cas9 has a sequence of a Cas9 variant of SEQ ID NO: 6611, e.g., as described herein. In any of the aforementioned embodiments, the Cas9 molecule comprises a linker between the His tag and another portion of the molecule, e.g., a GGS linker. Amino acid sequences of exemplary Cas9 molecules described above are provided below. “iProt” identifiers match those in FIG. 60.

iProt105026 (also referred to as iProt106154, iProt106331,
iProt106545, and PID426303, depending on the preparation of the
protein) (SEQ ID NO: 7821):
MAPKKKRKVD KKYSIGLDIG TNSVGWAVIT DEYKVPSKKF KVLGNTDRHS IKKNLIGALL
FDSGETAEAT RLKRTARRRY TRRKNRICYL QEIFSNEMAK VDDSFFHRLE ESFLVEEDKK
HERHPIFGNI VDEVAYHEKY PTIYHLRKKL VDSTDKADLR LIYLALAHMI KFRGHFLIEG
DLNPDNSDVD KLFIQLVQTY NQLFEENPIN ASGVDAKAIL SARLSKSRRL ENLIAQLPGE
KKNGLFGNLI ALSLGLTPNF KSNFDLAEDA KLQLSKDTYD DDLDNLLAQI GDQYADLFLA
AKNLSDAILL SDILRVNTEI TKAPLSASMI KRYDEHHQDL TLLKALVRQQ LPEKYKEIFF
DQSKNGYAGY IDGGASQEEF YKFIKPILEK MDGTEELLVK LNREDLLRKQ RTFDNGSIPH
QIHLGELHAI LRRQEDFYPF LKDNREKIEK ILTFRIPYYV GPLARGNSRF AWMTRKSEET
ITPWNFEEVV DKGASAQSFI ERMTNFDKNL PNEKVLPKHS LLYEYFTVYN ELTKVKYVTE
GMRKPAFLSG EQKKAIVDLL FKTNRKVTVK QLKEDYFKKI ECFDSVEISG VEDRFNASLG
TYHDLLKIIK DKDFLDNEEN EDILEDIVLT LTLFEDREMI EERLKTYAHL FDDKVMKQLK
RRRYTGWGRL SRKLINGIRD KQSGKTILDF LKSDGFANRN FMQLIHDDSL TFKEDIQKAQ
VSGQGDSLHE HIANLAGSPA IKKGILQTVK VVDELVKVMG RHKPENIVIE MARENQTTQK
GQKNSRERMK RIEEGIKELG SQILKEHPVE NTQLQNEKLY LYYLQNGRDM YVDQELDINR
LSDYDVDHIV PQSFLKDDSI DNKVLTRSDK NRGKSDNVPS EEVVKKMKNY
WRQLLNAKLI TQRKFDNLTK AERGGLSELD KAGFIKRQLV ETRQITKHVA QILDSRMNTK
YDENDKLIRE VKVITLKSKL VSDFRKDFQF YKVREINNYH HAHDAYLNAV VGTALIKKYP
KLESEFVYGD YKVYDVRKMI AKSEQEIGKA TAKYFFYSNI MNFFKTEITL ANGEIRKRPL
IETNGETGEI VWDKGRDFAT VRKVLSMPQV NIVKKTEVQT GGFSKESILP KRNSDKLIAR
KKDWDPKKYG GFDSPTVAYS VLVVAKVEKG KSKKLKSVKE LLGITIMERS SFEKNPIDFL
EAKGYKEVKK DLIIKLPKYS LFELENGRKR MLASAGELQK GNELALPSKY VNFLYLASHY
EKLKGSPEDN EQKQLFVEQH KHYLDEIIEQ ISEFSKRVIL ADANLDKVLS AYNKHRDKPI
REQAENIIHL FTLTNLGAPA AFKYFDTTID RKRYTSTKEV LDATLIHQSI TGLYETRIDL
SQLGGDSRAD PKKKRKVHHH HHH
iProt106518 (SEQ ID NO: 7822):
MAPKKKRKVD KKYSIGLDIG TNSVGWAVIT DEYKVPSKKF KVLGNTDRHS IKKNLIGALL
FDSGETAEAT RLKRTARRRY TRRKNRILYL QEIFSNEMAK VDDSFFHRLE ESFLVEEDKK
HERHPIFGNI VDEVAYHEKY PTIYHLRKKL VDSTDKADLR LIYLALAHMI KFRGHFLIEG
DLNPDNSDVD KLFIQLVQTY NQLFEENPIN ASGVDAKAIL SARLSKSRRL ENLIAQLPGE
KKNGLFGNLI ALSLGLTPNF KSNFDLAEDA KLQLSKDTYD DDLDNLLAQI GDQYADLFLA
AKNLSDAILL SDILRVNTEI TKAPLSASMI KRYDEHHQDL TLLKALVRQQ LPEKYKEIFF
DQSKNGYAGY IDGGASQEEF YKFIKPILEK MDGTEELLVK LNREDLLRKQ RTFDNGSIPH
QIHLGELHAI LRRQEDFYPF LKDNREKIEK ILTFRIPYYV GPLARGNSRF AWMTRKSEET
ITPWNFEEVV DKGASAQSFI ERMTNFDKNL PNEKVLPKHS LLYEYFTVYN ELTKVKYVTE
GMRKPAFLSG EQKKAIVDLL FKTNRKVTVK QLKEDYFKKI EEFDSVEISG VEDRFNASLG
TYHDLLKIIK DKDFLDNEEN EDILEDIVLT LTLFEDREMI EERLKTYAHL FDDKVMKQLK
RRRYTGWGRL SRKLINGIRD KQSGKTILDF LKSDGFANRN FMQLIHDDSL TFKEDIQKAQ
VSGQGDSLHE HIANLAGSPA IKKGILQTVK VVDELVKVMG RHKPENIVIE MARENQTTQK
GQKNSRERMK RIEEGIKELG SQILKEHPVE NTQLQNEKLY LYYLQNGRDM YVDQELDINR
LSDYDVDHIV PQSFLKDDSI DNKVLTRSDK NRGKSDNVPS EEVVKKMKNY
WRQLLNAKLI TQRKFDNLTK AERGGLSELD KAGFIKRQLV ETRQITKHVA QILDSRMNTK
YDENDKLIRE VKVITLKSKL VSDFRKDFQF YKVREINNYH HAHDAYLNAV VGTALIKKYP
KLESEFVYGD YKVYDVRKMI AKSEQEIGKA TAKYFFYSNI MNFFKTEITL ANGEIRKRPL
IETNGETGEI VWDKGRDFAT VRKVLSMPQV NIVKKTEVQT GGFSKESILP KRNSDKLIAR
KKDWDPKKYG GFDSPTVAYS VLVVAKVEKG KSKKLKSVKE LLGITIMERS SFEKNPIDFL
EAKGYKEVKK DLIIKLPKYS LFELENGRKR MLASAGELQK GNELALPSKY VNFLYLASHY
EKLKGSPEDN EQKQLFVEQH KHYLDEIIEQ ISEFSKRVIL ADANLDKVLS AYNKHRDKPI
REQAENIIHL FTLTNLGAPA AFKYFDTTID RKRYTSTKEV LDATLIHQSI TGLYETRIDL
SQLGGDSRAD PKKKRKVHHH HHH
iProt106519 (SEQ ID NO: 7823):
MGSSHHHHHH HHENLYFQGS MDKKYSIGLD IGTNSVGWAV ITDEYKVPSK
KFKVLGNTDR HSIKKNLIGA LLFDSGETAE ATRLKRTARR RYTRRKNRIC YLQEIFSNEM
AKVDDSFFHR LEESFLVEED KKHERHPIFG NIVDEVAYHE KYPTIYHLRK KLVDSTDKAD
LRLIYLALAH MIKFRGHFLI EGDLNPDNSD VDKLFIQLVQ TYNQLFEENP INASGVDAKA
ILSARLSKSR RLENLIAQLP GEKKNGLFGN LIALSLGLTP NFKSNFDLAE DAKLQLSKDT
YDDDLDNLLA QIGDQYADLF LAAKNLSDAI LLSDILRVNT EITKAPLSAS MIKRYDEHHQ
DLTLLKALVR QQLPEKYKEI FFDQSKNGYA GYIDGGASQE EFYKFIKPIL EKMDGTEELL
VKLNREDLLR KQRTFDNGSI PHQIHLGELH AILRRQEDFY PFLKDNREKI EKILTFRIPY
YVGPLARGNS RFAWMTRKSE ETITPWNFEE VVDKGASAQS FIERMTNFDK NLPNEKVLPK
HSLLYEYFTV YNELTKVKYV TEGMRKPAFL SGEQKKAIVD LLFKTNRKVT
VKQLKEDYFK KIECFDSVEI SGVEDRFNAS LGTYHDLLKI IKDKDFLDNE ENEDILEDIV
LTLTLFEDRE MIEERLKTYA HLFDDKVMKQ LKRRRYTGWG RLSRKLINGI RDKQSGKTIL
DFLKSDGFAN RNFMQLIHDD SLTFKEDIQK AQVSGQGDSL HEHIANLAGS PAIKKGILQT
VKVVDELVKV MGRHKPENIV IEMARENQTT QKGQKNSRER MKRIEEGIKE LGSQILKEHP
VENTQLQNEK LYLYYLQNGR DMYVDQELDI NRLSDYDVDH IVPQSFLKDD SIDNKVLTRS
DKNRGKSDNV PSEEVVKKMK NYWRQLLNAK LITQRKFDNL TKAERGGLSE
LDKAGFIKRQ LVETRQITKH VAQILDSRMN TKYDENDKLI REVKVITLKS KLVSDFRKDF
QFYKVREINN YHHAHDAYLN AVVGTALIKK YPKLESEFVY GDYKVYDVRK
MIAKSEQEIG KATAKYFFYS NIMNFFKTEI TLANGEIRKR PLIETNGETG EIVWDKGRDF
ATVRKVLSMP QVNIVKKTEV QTGGFSKESI LPKRNSDKLI ARKKDWDPKK YGGFDSPTVA
YSVLVVAKVE KGKSKKLKSV KELLGITIME RSSFEKNPID FLEAKGYKEV KKDLIIKLPK
YSLFELENGR KRMLASAGEL QKGNELALPS KYVNFLYLAS HYEKLKGSPE DNEQKQLFVE
QHKHYLDEII EQISEFSKRV ILADANLDKV LSAYNKHRDK PIREQAENII HLFTLTNLGA
PAAFKYFDTT IDRKRYTSTK EVLDATLIHQ SITGLYETRI DLSQLGGDGG GSPKKKRKV
iProt106520 (SEQ ID NO: 7824):
MAHHHHHHGG SPKKKRKVDK KYSIGLDIGT NSVGWAVITD EYKVPSKKFK
VLGNTDRHSI KKNLIGALLF DSGETAEATR LKRTARRRYT RRKNRICYLQ EIFSNEMAKV
DDSFFHRLEE SFLVEEDKKH ERHPIFGNIV DEVAYHEKYP TIYHLRKKLV DSTDKADLRL
IYLALAHMIK FRGHFLIEGD LNPDNSDVDK LFIQLVQTYN QLFEENPINA SGVDAKAILS
ARLSKSRRLE NLIAQLPGEK KNGLFGNLIA LSLGLTPNFK SNFDLAEDAK LQLSKDTYDD
DLDNLLAQIG DQYADLFLAA KNLSDAILLS DILRVNTEIT KAPLSASMIK RYDEHHQDLT
LLKALVRQQL PEKYKEIFFD QSKNGYAGYI DGGASQEEFY KFIKPILEKM DGTEELLVKL
NREDLLRKQR TFDNGSIPHQ IHLGELHAIL RRQEDFYPFL KDNREKIEKI LTFRIPYYVG
PLARGNSRFA WMTRKSEETI TPWNFEEVVD KGASAQSFIE RMTNFDKNLP NEKVLPKHSL
LYEYFTVYNE LTKVKYVTEG MRKPAFLSGE QKKAIVDLLF KTNRKVTVKQ LKEDYFKKIE
CFDSVEISGV EDRFNASLGT YHDLLKIIKD KDFLDNEENE DILEDIVLTL TLFEDREMIE
ERLKTYAHLF DDKVMKQLKR RRYTGWGRLS RKLINGIRDK QSGKTILDFL KSDGFANRNF
MQLIHDDSLT FKEDIQKAQV SGQGDSLHEH IANLAGSPAI KKGILQTVKV VDELVKVMGR
HKPENIVIEM ARENQTTQKG QKNSRERMKR IEEGIKELGS QILKEHPVEN TQLQNEKLYL
YYLQNGRDMY VDQELDINRL SDYDVDHIVP QSFLKDDSID NKVLTRSDKN RGKSDNVPSE
EVVKKMKNYW RQLLNAKLIT QRKFDNLTKA ERGGLSELDK AGFIKRQLVE
TRQITKHVAQ ILDSRMNTKY DENDKLIREV KVITLKSKLV SDFRKDFQFY KVREINNYHH
AHDAYLNAVV GTALIKKYPK LESEFVYGDY KVYDVRKMIA KSEQEIGKAT
AKYFFYSNIM NFFKTEITLA NGEIRKRPLI ETNGETGEIV WDKGRDFATV RKVLSMPQVN
IVKKTEVQTG GFSKESILPK RNSDKLIARK KDWDPKKYGG FDSPTVAYSV LVVAKVEKGK
SKKLKSVKEL LGITIMERSS FEKNPIDFLE AKGYKEVKKD LIIKLPKYSL FELENGRKRM
LASAGELQKG NELALPSKYV NFLYLASHYE KLKGSPEDNE QKQLFVEQHK HYLDEIIEQI
SEFSKRVILA DANLDKVLSA YNKHRDKPIR EQAENIIHLF TLTNLGAPAA FKYFDTTIDR
KRYTSTKEVL DATLIHQSIT GLYETRIDLS QLGGDSRADP KKKRKV
iProt106521 (SEQ ID NO: 7825):
MAPKKKRKVD KKYSIGLDIG TNSVGWAVIT DEYKVPSKKF KVLGNTDRHS IKKNLIGALL
FDSGETAEAT RLKRTARRRY TRRKNRICYL QEIFSNEMAK VDDSFFHRLE ESFLVEEDKK
HERHPIFGNI VDEVAYHEKY PTIYHLRKKL VDSTDKADLR LIYLALAHMI KFRGHFLIEG
DLNPDNSDVD KLFIQLVQTY NQLFEENPIN ASGVDAKAIL SARLSKSRRL ENLIAQLPGE
KKNGLFGNLI ALSLGLTPNF KSNFDLAEDA KLQLSKDTYD DDLDNLLAQI GDQYADLFLA
AKNLSDAILL SDILRVNTEI TKAPLSASMI KRYDEHHQDL TLLKALVRQQ LPEKYKEIFF
DQSKNGYAGY IDGGASQEEF YKFIKPILEK MDGTEELLVK LNREDLLRKQ RTFDNGSIPH
QIHLGELHAI LRRQEDFYPF LKDNREKIEK ILTFRIPYYV GPLARGNSRF AWMTRKSEET
ITPWNFEEVV DKGASAQSFI ERMTNFDKNL PNEKVLPKHS LLYEYFTVYN ELTKVKYVTE
GMRKPAFLSG EQKKAIVDLL FKTNRKVTVK QLKEDYFKKI ECFDSVEISG VEDRFNASLG
TYHDLLKIIK DKDFLDNEEN EDILEDIVLT LTLFEDREMI EERLKTYAHL FDDKVMKQLK
RRRYTGWGRL SRKLINGIRD KQSGKTILDF LKSDGFANRN FMQLIHDDSL TFKEDIQKAQ
VSGQGDSLHE HIANLAGSPA IKKGILQTVK VVDELVKVMG RHKPENIVIE MARENQTTQK
GQKNSRERMK RIEEGIKELG SQILKEHPVE NTQLQNEKLY LYYLQNGRDM YVDQELDINR
LSDYDVDHIV PQSFLKDDSI DNKVLTRSDK NRGKSDNVPS EEVVKKMKNY
WRQLLNAKLI TQRKFDNLTK AERGGLSELD KAGFIKRQLV ETRQITKHVA QILDSRMNTK
YDENDKLIRE VKVITLKSKL VSDFRKDFQF YKVREINNYH HAHDAYLNAV VGTALIKKYP
KLESEFVYGD YKVYDVRKMI AKSEQEIGKA TAKYFFYSNI MNFFKTEITL ANGEIRKRPL
IETNGETGEI VWDKGRDFAT VRKVLSMPQV NIVKKTEVQT GGFSKESILP KRNSDKLIAR
KKDWDPKKYG GFDSPTVAYS VLVVAKVEKG KSKKLKSVKE LLGITIMERS SFEKNPIDFL
EAKGYKEVKK DLIIKLPKYS LFELENGRKR MLASAGELQK GNELALPSKY VNFLYLASHY
EKLKGSPEDN EQKQLFVEQH KHYLDEIIEQ ISEFSKRVIL ADANLDKVLS AYNKHRDKPI
REQAENIIHL FTLTNLGAPA AFKYFDTTID RKRYTSTKEV LDATLIHQSI TGLYETRIDL
SQLGGDSRAD HHHHHH
iProt106522 (SEQ ID NO: 7826):
MAHHHHHHGG SDKKYSIGLD IGTNSVGWAV ITDEYKVPSK KFKVLGNTDR HSIKKNLIGA
LLFDSGETAE ATRLKRTARR RYTRRKNRIC YLQEIFSNEM AKVDDSFFHR LEESFLVEED
KKHERHPIFG NIVDEVAYHE KYPTIYHLRK KLVDSTDKAD LRLIYLALAH MIKFRGHFLI
EGDLNPDNSD VDKLFIQLVQ TYNQLFEENP INASGVDAKA ILSARLSKSR RLENLIAQLP
GEKKNGLFGN LIALSLGLTP NFKSNFDLAE DAKLQLSKDT YDDDLDNLLA QIGDQYADLF
LAAKNLSDAI LLSDILRVNT EITKAPLSAS MIKRYDEHHQ DLTLLKALVR QQLPEKYKEI
FFDQSKNGYA GYIDGGASQE EFYKFIKPIL EKMDGTEELL VKLNREDLLR KQRTFDNGSI
PHQIHLGELH AILRRQEDFY PFLKDNREKI EKILTFRIPY YVGPLARGNS RFAWMTRKSE
ETITPWNFEE VVDKGASAQS FIERMTNFDK NLPNEKVLPK HSLLYEYFTV YNELTKVKYV
TEGMRKPAFL SGEQKKAIVD LLFKTNRKVT VKQLKEDYFK KIECFDSVEI SGVEDRFNAS
LGTYHDLLKI IKDKDFLDNE ENEDILEDIV LTLTLFEDRE MIEERLKTYA HLFDDKVMKQ
LKRRRYTGWG RLSRKLINGI RDKQSGKTIL DFLKSDGFAN RNFMQLIHDD SLTFKEDIQK
AQVSGQGDSL HEHIANLAGS PAIKKGILQT VKVVDELVKV MGRHKPENIV IEMARENQTT
QKGQKNSRER MKRIEEGIKE LGSQILKEHP VENTQLQNEK LYLYYLQNGR DMYVDQELDI
NRLSDYDVDH IVPQSFLKDD SIDNKVLTRS DKNRGKSDNV PSEEVVKKMK
NYWRQLLNAK LITQRKFDNL TKAERGGLSE LDKAGFIKRQ LVETRQITKH VAQILDSRMN
TKYDENDKLI REVKVITLKS KLVSDFRKDF QFYKVREINN YHHAHDAYLN AVVGTALIKK
YPKLESEFVY GDYKVYDVRK MIAKSEQEIG KATAKYFFYS NIMNFFKTEI TLANGEIRKR
PLIETNGETG EIVWDKGRDF ATVRKVLSMP QVNIVKKTEV QTGGFSKESI LPKRNSDKLI
ARKKDWDPKK YGGFDSPTVA YSVLVVAKVE KGKSKKLKSV KELLGITIME RSSFEKNPID
FLEAKGYKEV KKDLIIKLPK YSLFELENGR KRMLASAGEL QKGNELALPS KYVNFLYLAS
HYEKLKGSPE DNEQKQLFVE QHKHYLDEII EQISEFSKRV ILADANLDKV LSAYNKHRDK
PIREQAENII HLFTLTNLGA PAAFKYFDTT IDRKRYTSTK EVLDATLIHQ SITGLYETRI
DLSQLGGDSR ADPKKKRKV
iProt106658 (SEQ ID NO: 7827):
MGSSHHHHHH HHENLYFQGS MDKKYSIGLD IGTNSVGWAV ITDEYKVPSK
KFKVLGNTDR HSIKKNLIGA LLFDSGETAE ATRLKRTARR RYTRRKNRIC YLQEIFSNEM
AKVDDSFFHR LEESFLVEED KKHERHPIFG NIVDEVAYHE KYPTIYHLRK KLVDSTDKAD
LRLIYLALAH MIKFRGHFLI EGDLNPDNSD VDKLFIQLVQ TYNQLFEENP INASGVDAKA
ILSARLSKSR RLENLIAQLP GEKKNGLFGN LIALSLGLTP NFKSNFDLAE DAKLQLSKDT
YDDDLDNLLA QIGDQYADLF LAAKNLSDAI LLSDILRVNT EITKAPLSAS MIKRYDEHHQ
DLTLLKALVR QQLPEKYKEI FFDQSKNGYA GYIDGGASQE EFYKFIKPIL EKMDGTEELL
VKLNREDLLR KQRTFDNGSI PHQIHLGELH AILRRQEDFY PFLKDNREKI EKILTFRIPY
YVGPLARGNS RFAWMTRKSE ETITPWNFEE VVDKGASAQS FIERMTNFDK NLPNEKVLPK
HSLLYEYFTV YNELTKVKYV TEGMRKPAFL SGEQKKAIVD LLFKTNRKVT
VKQLKEDYFK KIECFDSVEI SGVEDRFNAS LGTYHDLLKI IKDKDFLDNE ENEDILEDIV
LTLTLFEDRE MIEERLKTYA HLFDDKVMKQ LKRRRYTGWG RLSRKLINGI RDKQSGKTIL
DFLKSDGFAN RNFMQLIHDD SLTFKEDIQK AQVSGQGDSL HEHIANLAGS PAIKKGILQT
VKVVDELVKV MGRHKPENIV IEMARENQTT QKGQKNSRER MKRIEEGIKE LGSQILKEHP
VENTQLQNEK LYLYYLQNGR DMYVDQELDI NRLSDYDVDH IVPQSFLKDD SIDNKVLTRS
DKNRGKSDNV PSEEVVKKMK NYWRQLLNAK LITQRKFDNL TKAERGGLSE
LDKAGFIKRQ LVETRQITKH VAQILDSRMN TKYDENDKLI REVKVITLKS KLVSDFRKDF
QFYKVREINN YHHAHDAYLN AVVGTALIKK YPKLESEFVY GDYKVYDVRK
MIAKSEQEIG KATAKYFFYS NIMNFFKTEI TLANGEIRKR PLIETNGETG EIVWDKGRDF
ATVRKVLSMP QVNIVKKTEV QTGGFSKESI LPKRNSDKLI ARKKDWDPKK YGGFDSPTVA
YSVLVVAKVE KGKSKKLKSV KELLGITIME RSSFEKNPID FLEAKGYKEV KKDLIIKLPK
YSLFELENGR KRMLASAGEL QKGNELALPS KYVNFLYLAS HYEKLKGSPE DNEQKQLFVE
QHKHYLDEII EQISEFSKRV ILADANLDKV LSAYNKHRDK PIREQAENII HLFTLTNLGA
PAAFKYFDTT IDRKRYTSTK EVLDATLIHQ SITGLYETRI DLSQLGGDGG GSPKKKRKV
iProt106745 (SEQ ID NO: 7828):
MAPKKKRKVD KKYSIGLDIG TNSVGWAVIT DEYKVPSKKF KVLGNTDRHS IKKNLIGALL
FDSGETAEAT RLKRTARRRY TRRKNRICYL QEIFSNEMAK VDDSFFHRLE ESFLVEEDKK
HERHPIFGNI VDEVAYHEKY PTIYHLRKKL VDSTDKADLR LIYLALAHMI KFRGHFLIEG
DLNPDNSDVD KLFIQLVQTY NQLFEENPIN ASGVDAKAIL SARLSKSRRL ENLIAQLPGE
KKNGLFGNLI ALSLGLTPNF KSNFDLAEDA KLQLSKDTYD DDLDNLLAQI GDQYADLFLA
AKNLSDAILL SDILRVNTEI TKAPLSASMI KRYDEHHQDL TLLKALVRQQ LPEKYKEIFF
DQSKNGYAGY IDGGASQEEF YKFIKPILEK MDGTEELLVK LNREDLLRKQ RTFDNGSIPH
QIHLGELHAI LRRQEDFYPF LKDNREKIEK ILTFRIPYYV GPLARGNSRF AWMTRKSEET
ITPWNFEEVV DKGASAQSFI ERMTNFDKNL PNEKVLPKHS LLYEYFTVYN ELTKVKYVTE
GMRKPAFLSG EQKKAIVDLL FKTNRKVTVK QLKEDYFKKI ECFDSVEISG VEDRFNASLG
TYHDLLKIIK DKDFLDNEEN EDILEDIVLT LTLFEDREMI EERLKTYAHL FDDKVMKQLK
RRRYTGWGRL SRKLINGIRD KQSGKTILDF LKSDGFANRN FMQLIHDDSL TFKEDIQKAQ
VSGQGDSLHE HIANLAGSPA IKKGILQTVK VVDELVKVMG RHKPENIVIE MARENQTTQK
GQKNSRERMK RIEEGIKELG SQILKEHPVE NTQLQNEKLY LYYLQNGRDM YVDQELDINR
LSDYDVDHIV PQSFLKDDSI DNAVLTRSDK NRGKSDNVPS EEVVKKMKNY
WRQLLNAKLI TQRKFDNLTK AERGGLSELD KAGFIKRQLV ETRQITKHVA QILDSRMNTK
YDENDKLIRE VKVITLKSKL VSDFRKDFQF YKVREINNYH HAHDAYLNAV VGTALIKKYP
KLESEFVYGD YKVYDVRKMI AKSEQEIGKA TAKYFFYSNI MNFFKTEITL ANGEIRKRPL
IETNGETGEI VWDKGRDFAT VRKVLSMPQV NIVKKTEVQT GGFSKESILP KRNSDKLIAR
KKDWDPKKYG GFDSPTVAYS VLVVAKVEKG KSKKLKSVKE LLGITIMERS SFEKNPIDFL
EAKGYKEVKK DLIIKLPKYS LFELENGRKR MLASAGELQK GNELALPSKY VNFLYLASHY
EKLKGSPEDN EQKQLFVEQH KHYLDEIIEQ ISEFSKRVIL ADANLDKVLS AYNKHRDKPI
REQAENIIHL FTLTNLGAPA AFKYFDTTID RKRYTSTKEV LDATLIHQSI TGLYETRIDL
SQLGGDSRAD PKKKRKVHHH HHH
iProt106746 (SEQ ID NO: 7829):
MAPKKKRKVD KKYSIGLDIG TNSVGWAVIT DEYKVPSKKF KVLGNTDRHS IKKNLIGALL
FDSGETAEAT RLKRTARRRY TRRKNRICYL QEIFSNEMAK VDDSFFHRLE ESFLVEEDKK
HERHPIFGNI VDEVAYHEKY PTIYHLRKKL VDSTDKADLR LIYLALAHMI KFRGHFLIEG
DLNPDNSDVD KLFIQLVQTY NQLFEENPIN ASGVDAKAIL SARLSKSRRL ENLIAQLPGE
KKNGLFGNLI ALSLGLTPNF KSNFDLAEDA KLQLSKDTYD DDLDNLLAQI GDQYADLFLA
AKNLSDAILL SDILRVNTEI TKAPLSASMI KRYDEHHQDL TLLKALVRQQ LPEKYKEIFF
DQSKNGYAGY IDGGASQEEF YKFIKPILEK MDGTEELLVK LNREDLLRKQ RTFDNGSIPH
QIHLGELHAI LRRQEDFYPF LKDNREKIEK ILTFRIPYYV GPLARGNSRF AWMTRKSEET
ITPWNFEEVV DKGASAQSFI ERMTNFDKNL PNEKVLPKHS LLYEYFTVYN ELTKVKYVTE
GMRKPAFLSG EQKKAIVDLL FKTNRKVTVK QLKEDYFKKI ECFDSVEISG VEDRFNASLG
TYHDLLKIIK DKDFLDNEEN EDILEDIVLT LTLFEDREMI EERLKTYAHL FDDKVMKQLK
RRRYTGWGRL SRKLINGIRD KQSGKTILDF LKSDGFANRN FMQLIHDDSL TFKEDIQKAQ
VSGQGDSLHE HIANLAGSPA IKKGILQTVK VVDELVKVMG RHKPENIVIE MARENQTTQK
GQKNSRERMK RIEEGIKELG SQILKEHPVE NTQLQNEALY LYYLQNGRDM YVDQELDINR
LSDYDVDHIV PQSFLKDDSI DNKVLTRSDK NRGKSDNVPS EEVVKKMKNY
WRQLLNAKLI TQRKFDNLTK AERGGLSELD KAGFIKRQLV ETRQITKHVA QILDSRMNTK
YDENDKLIRE VKVITLKSKL VSDFRKDFQF YKVREINNYH HAHDAYLNAV VGTALIKKYP
ALESEFVYGD YKVYDVRKMI AKSEQEIGKA TAKYFFYSNI MNFFKTEITL ANGEIRKAPL
IETNGETGEI VWDKGRDFAT VRKVLSMPQV NIVKKTEVQT GGFSKESILP KRNSDKLIAR
KKDWDPKKYG GFDSPTVAYS VLVVAKVEKG KSKKLKSVKE LLGITIMERS SFEKNPIDFL
EAKGYKEVKK DLIIKLPKYS LFELENGRKR MLASAGELQK GNELALPSKY VNFLYLASHY
EKLKGSPEDN EQKQLFVEQH KHYLDEIIEQ ISEFSKRVIL ADANLDKVLS AYNKHRDKPI
REQAENIIHL FTLTNLGAPA AFKYFDTTID RKRYTSTKEV LDATLIHQSI TGLYETRIDL
SQLGGDSRAD PKKKRKVHHH HHH
iProt106747 (SEQ ID NO: 7830):
MAPKKKRKVD KKYSIGLDIG TNSVGWAVIT DEYKVPSKKF KVLGNTDRHS IKKNLIGALL
FDSGETAEAT RLKRTARRRY TRRKNRICYL QEIFSNEMAK VDDSFFHRLE ESFLVEEDKK
HERHPIFGNI VDEVAYHEKY PTIYHLRKKL VDSTDKADLR LIYLALAHMI KFRGHFLIEG
DLNPDNSDVD KLFIQLVQTY NQLFEENPIN ASGVDAKAIL SARLSKSRRL ENLIAQLPGE
KKNGLFGNLI ALSLGLTPNF KSNFDLAEDA KLQLSKDTYD DDLDNLLAQI GDQYADLFLA
AKNLSDAILL SDILRVNTEI TKAPLSASMI KRYDEHHQDL TLLKALVRQQ LPEKYKEIFF
DQSKNGYAGY IDGGASQEEF YKFIKPILEK MDGTEELLVK LNREDLLRKQ RTFDNGSIPH
QIHLGELHAI LRRQEDFYPF LKDNREKIEK ILTFRIPYYV GPLARGNSRF AWMTRKSEET
ITPWNFEEVV DKGASAQSFI ERMTNFDKNL PNEKVLPKHS LLYEYFTVYN ELTKVKYVTE
GMRKPAFLSG EQKKAIVDLL FKTNRKVTVK QLKEDYFKKI ECFDSVEISG VEDRFNASLG
TYHDLLKIIK DKDFLDNEEN EDILEDIVLT LTLFEDREMI EERLKTYAHL FDDKVMKQLK
RRRYTGWGRL SRKLINGIRD KQSGKTILDF LKSDGFANRN FMQLIHDDSL TFKEDIQKAQ
VSGQGDSLHE HIANLAGSPA IKKGILQTVK VVDELVKVMG RHKPENIVIE MARENQTTQK
GQKNSRERMK RIEEGIKELG SQILKEHPVE NTQLQNEKLY LYYLQNGRDM YVDQELDINR
LSDYDVDHIV PQSFLADDSI DNKVLTRSDK NRGKSDNVPS EEVVKKMKNY
WRQLLNAKLI TQRKFDNLTK AERGGLSELD KAGFIKRQLV ETRQITKHVA QILDSRMNTK
YDENDKLIRE VKVITLKSKL VSDFRKDFQF YKVREINNYH HAHDAYLNAV VGTALIKKYP
ALESEFVYGD YKVYDVRKMI AKSEQEIGKA TAKYFFYSNI MNFFKTEITL ANGEIRKAPL
IETNGETGEI VWDKGRDFAT VRKVLSMPQV NIVKKTEVQT GGFSKESILP KRNSDKLIAR
KKDWDPKKYG GFDSPTVAYS VLVVAKVEKG KSKKLKSVKE LLGITIMERS SFEKNPIDFL
EAKGYKEVKK DLIIKLPKYS LFELENGRKR MLASAGELQK GNELALPSKY VNFLYLASHY
EKLKGSPEDN EQKQLFVEQH KHYLDEIIEQ ISEFSKRVIL ADANLDKVLS AYNKHRDKPI
REQAENIIHL FTLTNLGAPA AFKYFDTTID RKRYTSTKEV LDATLIHQSI TGLYETRIDL
SQLGGDSRAD PKKKRKVHHH HHH
iProt106884 (SEQ ID NO: 7831):
MAPKKKRKVD KKYSIGLDIG TNSVGWAVIT DEYKVPSKKF KVLGNTDRHS IKKNLIGALL
FDSGETAEAT RLKRTARRRY TRRKNRICYL QEIFSNEMAK VDDSFFHRLE ESFLVEEDKK
HERHPIFGNI VDEVAYHEKY PTIYHLRKKL VDSTDKADLR LIYLALAHMI KFRGHFLIEG
DLNPDNSDVD KLFIQLVQTY NQLFEENPIN ASGVDAKAIL SARLSKSRRL ENLIAQLPGE
KKNGLFGNLI ALSLGLTPNF KSNFDLAEDA KLQLSKDTYD DDLDNLLAQI GDQYADLFLA
AKNLSDAILL SDILRVNTEI TKAPLSASMI KRYDEHHQDL TLLKALVRQQ LPEKYKEIFF
DQSKNGYAGY IDGGASQEEF YKFIKPILEK MDGTEELLVK LNREDLLRKQ RTFDNGSIPH
QIHLGELHAI LRRQEDFYPF LKDNREKIEK ILTFRIPYYV GPLARGNSRF AWMTRKSEET
ITPWNFEEVV DKGASAQSFI ERMTAFDKNL PNEKVLPKHS LLYEYFTVYN ELTKVKYVTE
GMRKPAFLSG EQKKAIVDLL FKTNRKVTVK QLKEDYFKKI ECFDSVEISG VEDRFNASLG
TYHDLLKIIK DKDFLDNEEN EDILEDIVLT LTLFEDREMI EERLKTYAHL FDDKVMKQLK
RRRYTGWGAL SRKLINGIRD KQSGKTILDF LKSDGFANRN FMALIHDDSL TFKEDIQKAQ
VSGQGDSLHE HIANLAGSPA IKKGILQTVK VVDELVKVMG RHKPENIVIE MARENQTTQK
GQKNSRERMK RIEEGIKELG SQILKEHPVE NTQLQNEKLY LYYLQNGRDM YVDQELDINR
LSDYDVDHIV PQSFLKDDSI DNKVLTRSDK NRGKSDNVPS EEVVKKMKNY
WRQLLNAKLI TQRKFDNLTK AERGGLSELD KAGFIKRQLV ETRAITKHVA QILDSRMNTK
YDENDKLIRE VKVITLKSKL VSDFRKDFQF YKVREINNYH HAHDAYLNAV VGTALIKKYP
KLESEFVYGD YKVYDVRKMI AKSEQEIGKA TAKYFFYSNI MNFFKTEITL ANGEIRKRPL
IETNGETGEI VWDKGRDFAT VRKVLSMPQV NIVKKTEVQT GGFSKESILP KRNSDKLIAR
KKDWDPKKYG GFDSPTVAYS VLVVAKVEKG KSKKLKSVKE LLGITIMERS SFEKNPIDFL
EAKGYKEVKK DLIIKLPKYS LFELENGRKR MLASAGELQK GNELALPSKY VNFLYLASHY
EKLKGSPEDN EQKQLFVEQH KHYLDEIIEQ ISEFSKRVIL ADANLDKVLS AYNKHRDKPI
REQAENIIHL FTLTNLGAPA AFKYFDTTID RKRYTSTKEV LDATLIHQSI TGLYETRIDL
SQLGGDSRAD PKKKRKVHHH HHH

[0548] Nucleic Acids Encoding Cas9 Molecules

[0549] Nucleic acids encoding the Cas9 molecules, e.g., an active Cas9 molecule or an inactive Cas9 molecule are provided herein.

[0550] Exemplary nucleic acids encoding Cas9 molecules are described in Cong et al, SCIENCE 2013, 399(6121):819-823; Wang et al, CELL 2013, 153(4):910-918; Mali et al., SCIENCE 2013, 399(6121):823-826; Jinek et al, SCIENCE 2012, 337(6096):816-821.

[0551] In an embodiment, a nucleic acid encoding a Cas9 molecule can be a synthetic nucleic acid sequence. For example, the synthetic nucleic acid molecule can be chemically modified, e.g., as described in Section XIII. In an embodiment, the Cas9 mRNA has one or more of, e.g., all of the following properties: it is capped, polyadenylated, substituted with 5-methylcytidine and/or pseudouridine.

[0552] In addition or alternatively, the synthetic nucleic acid sequence can be codon optimized, e.g., at least one non-common codon or less-common codon has been replaced by a common codon. For example, the synthetic nucleic acid can direct the synthesis of an optimized messenger mRNA, e.g., optimized for expression in a mammalian expression system, e.g., described herein.

[0553] Provided below is an exemplary codon optimized nucleic acid sequence encoding a Cas9 molecule of S. pyogenes.

| (SEQ ID NO: 6628) | |
|---|---|
| atggataaaa agtacagcat cgggctggac atcggtacaa actcagtggg gtgggccgtg | 60 |
| attacggacg agtacaaggt accctccaaa aaatttaaag tgctgggtaa cacggacaga | 120 |
| cactctataa agaaaaatct tattggagcc ttgctgttcg actcaggcga gacagccgaa | 180 |
| gccacaaggt tgaagcggac cgccaggagg cggtatacca ggagaaagaa ccgcatatgc | 240 |
| tacctgcaag aaatcttcag taacgagatg gcaaaggttg acgatagctt tttccatcgc | 300 |
| ctggaagaat cctttcttgt tgaggaagac aagaagcacg aacggcaccc catctttggc | 360 |
| aatattgtcg acgaagtggc atatcacgaa aagtacccga ctatctacca cctcaggaag | 420 |
| aagctggtgg actctaccga taaggcggac ctcagactta tttatttggc actcgcccac | 480 |
| atgattaaat ttagaggaca tttcttgatc gagggcgacc tgaacccgga caacagtgac | 540 |
| gtcgataagc tgttcatcca acttgtgcag acctacaatc aactgttcga agaaaaccct | 600 |
| ataaatgctt caggagtcga cgctaaagca atcctgtccg cgcgcctctc aaaatctaga | 660 |
| agacttgaga atctgattgc tcagttgccc ggggaaaaga aaaatggatt gtttggcaac | 720 |
| ctgatcgccc tcagtctcgg actgacccca aatttcaaaa gtaacttcga cctggccgaa | 780 |
| gacgctaagc tccagctgtc caaggacaca tacgatgacg acctcgacaa tctgctggcc | 840 |
| cagattgggg atcagtacgc cgatctcttt ttggcagcaa agaacctgtc cgacgccatc | 900 |
| ctgttgagcg atatcttgag agtgaacacc gaaattacta aagcacccct tagcgcatct | 960 |
| atgatcaagc ggtacgacga gcatcatcag gatctgaccc tgctgaaggc tcttgtgagg | 1020 |
| caacagctcc ccgaaaaata caaggaaatc ttctttgacc agagcaaaaa cggctacgct | 1080 |
| ggctatatag atggtggggc cagtcaggag gaattctata aattcatcaa gcccattctc | 1140 |
| gagaaaatgg acggcacaga ggagttgctg gtcaaactta acagggagga cctgctgcgg | 1200 |
| aagcagcgga cctttgacaa cgggtctatc ccccaccaga ttcatctggg cgaactgcac | 1260 |
| gcaatcctga ggaggcagga ggatttttat ccttttctta aagataaccg cgagaaaata | 1320 |
| gaaaagattc ttacattcag gatcccgtac tacgtgggac ctctcgcccg gggcaattca | 1380 |
| cggtttgcct ggatgacaag gaagtcagag gagactatta caccttggaa cttcgaagaa | 1440 |
| gtggtggaca agggtgcatc tgcccagtct ttcatcgagc ggatgacaaa ttttgacaag | 1500 |
| aacctcccta atgagaaggt gctgcccaaa cattctctgc tctacgagta ctttaccgtc | 1560 |
| tacaatgaac tgactaaagt caagtacgtc accgagggaa tgaggaagcc ggcattcctt | 1620 |
| agtggagaac agaagaaggc gattgtagac ctgttgttca agaccaacag gaaggtgact | 1680 |
| gtgaagcaac ttaaagaaga ctactttaag aagatcgaat gttttgacag tgtggaaatt | 1740 |
| tcaggggttg aagaccgctt caatgcgtca ttggggactt accatgatct tctcaagatc | 1800 |
| ataaaggaca aagacttcct ggacaacgaa gaaaatgagg atattctcga agacatcgtc | 1860 |
| ctcaccctga ccctgttcga agacagggaa atgatagaag agcgcttgaa aacctatgcc | 1920 |
| cacctcttcg acgataaagt tatgaagcag ctgaagcgca ggagatacac aggatgggga | 1980 |
| agattgtcaa ggaagctgat caatggaatt agggataaac agagtggcaa gaccatactg | 2040 |
| gatttcctca aatctgatgg cttcgccaat aggaacttca tgcaactgat tcacgatgac | 2100 |
| tctcttacct tcaaggagga cattcaaaag gctcaggtga gcgggcaggg agactccctt | 2160 |
| catgaacaca tcgcgaattt ggcaggttcc cccgctatta aaaagggcat ccttcaaact | 2220 |
| gtcaaggtgg tggatgaatt ggtcaaggta atgggcagac ataagccaga aaatattgtg | 2280 |
| atcgagatgg cccgcgaaaa ccagaccaca cagaagggcc agaaaaatag tagagagcgg | 2340 |
| atgaagagga tcgaggaggg catcaaagag ctgggatctc agattctcaa agaacacccc | 2400 |
| gtagaaaaca cacagctgca gaacgaaaaa ttgtacttgt actatctgca gaacggcaga | 2460 |
| gacatgtacg tcgaccaaga acttgatatt aatagactgt ccgactatga cgtagaccat | 2520 |
| atcgtgcccc agtccttcct gaaggacgac tccattgata acaaagtctt gacaagaagc | 2580 |
| gacaagaaca ggggtaaaag tgataatgtg cctagcgagg aggtggtgaa aaaaatgaag | 2640 |
| aactactggc gacagctgct taatgcaaag ctcattacac aacggaagtt cgataatctg | 2700 |
| acgaaagcag agagaggtgg cttgtctgag ttggacaagg cagggtttat taagcggcag | 2760 |
| ctggtggaaa ctaggcagat cacaaagcac gtggcgcaga ttttggacag ccggatgaac | 2820 |
| acaaaatacg acgaaaatga taaactgata cgagaggtca aagttatcac gctgaaaagc | 2880 |
| aagctggtgt ccgattttcg gaaagacttc cagttctaca aagttcgcga gattaataac | 2940 |
| taccatcatg ctcacgatgc gtacctgaac gctgttgtcg ggaccgcctt gataaagaag | 3000 |
| tacccaaagc tggaatccga gttcgtatac ggggattaca aagtgtacga tgtgaggaaa | 3060 |
| atgatagcca agtccgagca ggagattgga aaggccacag ctaagtactt cttttattct | 3120 |
| aacatcatga atttttttaa gacggaaatt accctggcca acggagagat cagaaagcgg | 3180 |
| ccccttatag agacaaatgg tgaaacaggt gaaatcgtct gggataaggg cagggatttc | 3240 |
| gctactgtga ggaaggtgct gagtatgcca caggtaaata tcgtgaaaaa aaccgaagta | 3300 |
| cagaccggag gattttccaa ggaaagcatt ttgcctaaaa gaaactcaga caagctcatc | 3360 |
| gcccgcaaga aagattggga ccctaagaaa tacgggggat ttgactcacc caccgtagcc | 3420 |
| tattctgtgc tggtggtagc taaggtggaa aaaggaaagt ctaagaagct gaagtccgtg | 3480 |
| aaggaactct tgggaatcac tatcatggaa agatcatcct ttgaaaagaa ccctatcgat | 3540 |
| ttcctggagg ctaagggtta caaggaggtc aagaaagacc tcatcattaa actgccaaaa | 3600 |
| tactctctct tcgagctgga aaatggcagg aagagaatgt tggccagcgc cggagagctg | 3660 |
| caaaagggaa acgagcttgc tctgccctcc aaatatgtta attttctcta tctcgcttcc | 3720 |
| cactatgaaa agctgaaagg gtctcccgaa gataacgagc agaagcagct gttcgtcgaa | 3780 |
| cagcacaagc actatctgga tgaaataatc gaacaaataa gcgagttcag caaaagggtt | 3840 |
| atcctggcgg atgctaattt ggacaaagta ctgtctgctt ataacaagca ccgggataag | 3900 |
| cctattaggg aacaagccga gaatataatt cacctcttta cactcacgaa tctcggagcc | 3960 |
| cccgccgcct tcaaatactt tgatacgact atcgaccgga aacggtatac cagtaccaaa | 4020 |
| gaggtcctcg atgccaccct catccaccag tcaattactg gcctgtacga aacacggatc | 4080 |
| gacctctctc aactgggcgg cgactag | 4107 |

[0554] If the above Cas9 sequences are fused with a peptide or polypeptide at the C-terminus (e.g., an inactive Cas9 fused with a transcription repressor at the C-terminus), it is understood that the stop codon will be removed.

[0555] VI. Functional Analysis of Candidate Molecules

[0556] Candidate Cas9 molecules, candidate gRNA molecules, candidate Cas9 molecule/gRNA molecule complexes, can be evaluated by art-known methods or as described herein. For example, exemplary methods for evaluating the endonuclease activity of Cas9 molecule are described, e.g., in Jinek el al., SCIENCE 2012; 337(6096):8 16-821.

[0557] VII. Template Nucleic Acids (for Introduction of Nucleic Acids)

[0558] The term “template nucleic acid” or “donor template” as used herein refers to a nucleic acid to be inserted at or near a target sequence that has been modified, e.g., cleaved, by a CRISPR system of the present invention. In an embodiment, nucleic acid sequence at or near the target sequence is modified to have some or all of the sequence of the template nucleic acid, typically at or near cleavage site(s). In an embodiment, the template nucleic acid is single stranded. In an alternate embodiment, the template nucleic acid is double stranded. In an embodiment, the template nucleic acid is DNA, e.g., double stranded DNA. In an alternate embodiment, the template nucleic acid is single stranded DNA.

[0559] In embodiments, the template nucleic acid comprises sequence encoding a globin protein, e.g., a beta globin, e.g., comprises a beta globin gene. In an embodiment, the beta globin encoded by the nucleic acid comprises one or more mutations, e.g., anti-sickling mutations. In an embodiment, the beta globin encoded by the nucleic acid comprises the mutation T87Q. In an embodiment, the beta globin encoded by the nucleic acid comprises the mutation G16D. In an embodiment, the beta globin encoded by the nucleic acid comprises the mutation E22A. In an embodiment, the beta globin gene comprises the mutations G16D, E22A and T87Q. In embodiments, the template nucleic acid further comprises one or more regulatory elements, e.g., a promoter (e.g., a human beta globin promoter), a 3′ enhancer, and/or at least a portion of a globin locus control region (e.g., one or more DNase hypersensitivity sites (e.g., HS2, HS3 and/or HS4 of the human globin locus)).

[0560] In other embodiments, the template nucleic acid comprises sequence encoding a gamma globin, e.g., comprises a gamma globin gene. In embodiments, the template nucleic acid comprises sequence encoding more than one copy of a gamma globin protein, e.g., comprises two or more, e.g., two, gamma globin gene sequences. In embodiments, the template nucleic acid further comprises one or more regulatory elements, e.g., a promotor and/or enhancer.

[0561] In an embodiment, the template nucleic acid alters the structure of the target position by participating in a homology directed repair event. In an embodiment, the template nucleic acid alters the sequence of the target position. In an embodiment, the template nucleic acid results in the incorporation of a modified, or non-naturally occurring base into the target nucleic acid.

[0562] Mutations in a gene or pathway described herein may be corrected using one of the approaches discussed herein. In an embodiment, a mutation in a gene or pathway described herein is corrected by homology directed repair (HDR) using a template nucleic acid. In an embodiment, a mutation in a gene or pathway described herein is corrected by homologous recombination (HR) using a template nucleic acid. In an embodiment, a mutation in a gene or pathway described herein is corrected by Non-Homologous End Joining (NHEJ) repair using a template nucleic acid. In other embodiments, nucleic acid encoding molecules of interest may be inserted at or near a site modified by a CRISPR system of the present invention. In embodiments, the template nucleic acid comprises regulatory elements, e.g., one or more promotors and/or enhancers, operably linked to the nucleic acid sequence encoding a molecule of interest, e.g., as described herein.

[0563] HDR or HR Repair and Template Nucleic Acids

[0564] As described herein, nuclease-induced homology directed repair (HDR) or homologous recombination (HR) can be used to alter a target sequence and correct (e.g., repair or edit) a mutation in the genome. While not wishing to be bound by theory, it is believed that alteration of the target sequence occurs by repair based on a donor template or template nucleic acid. For example, the donor template or the template nucleic acid provides for alteration of the target sequence. It is contemplated that a plasmid donor or linear double stranded template can be used as a template for homologous recombination. It is further contemplated that a single stranded donor template can be used as a template for alteration of the target sequence by alternate methods of homology directed repair (e.g., single strand annealing) between the target sequence and the donor template. Donor template-effected alteration of a target sequence may depend on cleavage by a Cas9 molecule. Cleavage by Cas9 can comprise a double strand break, one single strand break, or two single strand breaks.

[0565] In an embodiment, a mutation can be corrected by either a single double-strand break or two single strand breaks. In an embodiment, a mutation can be corrected by providing a template and a CRISPR/Cas9 system that creates (1) one double strand break, (2) two single strand breaks, (3) two double stranded breaks with a break occurring on each side of the target sequence, (4) one double stranded break and two single strand breaks with the double strand break and two single strand breaks occurring on each side of the target sequence, (5) four single stranded breaks with a pair of single stranded breaks occurring on each side of the target sequence, or (6) one single strand break.

[0566] Double Strand Break Mediated Correction

[0567] In an embodiment, double strand cleavage is effected by a Cas9 molecule having cleavage activity associated with an HNH-like domain and cleavage activity associated with a RuvC-like domain, e.g., an N-terminal RuvC-like domain, e.g., a wild type Cas9. Such embodiments require only a single gRNA.

[0568] Single Strand Break Mediated Correction

[0569] In other embodiments, two single strand breaks, or nicks, are effected by a Cas9 molecule having nickase activity, e.g., cleavage activity associated with an HNH-like domain or cleavage activity associated with an N-terminal RuvC-like domain. Such embodiments require two gRNAs, one for placement of each single strand break. In an embodiment, the Cas9 molecule having nickase activity cleaves the strand to which the gRNA hybridizes, but not the strand that is complementary to the strand to which the gRNA hybridizes. In an embodiment, the Cas9 molecule having nickase activity does not cleave the strand to which the gRNA hybridizes, but rather cleaves the strand that is complementary to the strand to which the gRNA hybridizes.

[0570] In an embodiment, the nickase has HNH activity, e.g., a Cas9 molecule having the RuvC activity inactivated, e.g., a Cas9 molecule having a mutation at D10, e.g., the D10A mutation. D10A inactivates RuvC; therefore, the Cas9 nickase has (only) HN H activity and will cut on the strand to which the gRNA hybridizes (e.g., the complementary strand, which does not have the NGG PAM on it). In other embodiments, a Cas9 molecule having an H840, e.g., an H840A, mutation can be used as a nickase. H840A inactivates HNH; therefore, the Cas9 nickase has (only) RuvC activity and cuts on the non-complementary strand (e.g., the strand that has the NGG PAM and whose sequence is identical to the gRNA).

[0571] In an embodiment, in which a nickase and two gRNAs are used to position two single strand nicks, one nick is on the + strand and one nick is on the − strand of the target nucleic acid. The PAMs are outwardly facing. The gRNAs can be selected such that the gRNAs are separated by, from about 0-50, 0-100, or 0-200 nucleotides. In an embodiment, there is no overlap between the target sequence that is complementary to the targeting domains of the two gRNAs. In an embodiment, the gRNAs do not overlap and are separated by as much as 50, 100, or 200 nucleotides. In an embodiment, the use of two gRNAs can increase specificity, e.g., by decreasing off-target binding (Ran el cil., CELL 2013).

[0572] In an embodiment, a single nick can be used to induce HDR. It is contemplated herein that a single nick can be used to increase the ratio of HDR, HR or NHEJ at a given cleavage site.

[0573] Placement of the double strand break or a single strand break relative to target position

[0574] The double strand break or single strand break in one of the strands should be sufficiently close to target position such that correction occurs. In an embodiment, the distance is not more than 50, 100, 200, 300, 350 or 400 nucleotides. While not wishing to be bound by theory, it is believed that the break should be sufficiently close to target position such that the break is within the region that is subject to exonuclease-mediated removal during end resection. If the distance between the target position and a break is too great, the mutation may not be included in the end resection and, therefore, may not be corrected, as donor sequence may only be used to correct sequence within the end resection region.

[0575] In an embodiment, in which a gRNA (unimolecular (or chimeric) or modular gRNA) and Cas9 nuclease induce a double strand break for the purpose of inducing HDR- or HR-mediated correction, the cleavage site is between 0-200 bp (e.g., 0 to 175, 0 to 150, 0 to 125, 0 to 100, 0 to 75, 0 to 50, 0 to 25, 25 to 200, 25 to 175, 25 to 150, 25 to 125, 25 to 100, 25 to 75, 25 to 50, 50 to 200, 50 to 175, 50 to 150, 50 to 125, 50 to 100, 50 to 75, 75 to 200, 75 to 175, 75 to 150, 75 to 1 25, 75 to 100 bp) away from the target position. In an embodiment, the cleavage site is between 0-100 bp (e.g., 0 to 75, 0 to 50, 0 to 25, 25 to 100, 25 to 75, 25 to 50, 50 to 100, 50 to 75 or 75 to 100 bp) away from the target position.

[0576] In an embodiment, in which two gRNAs (independently, unimolecular (or chimeric) or modular gRNA) complexing with Cas9 nickases induce two single strand breaks for the purpose of inducing HDR-mediated correction, the closer nick is between 0-200 bp (e.g., 0 to 175, 0 to 150, 0 to 125, 0 to 100, 0 to 75, 0 to 50, 0 to 25, 25 to 200, 25 to 175, 25 to 150, 25 to 125, 25 to 100, 25 to 75, 25 to 50, 50 to 200, 50 to 175, 50 to 150, 50 to 125, 50 to 100, 50 to 75, 75 to 200, 75 to 175, 75 to 150, 75 to 125, 75 to 100 bp) away from the target position and the two nicks will ideally be within 25-55 bp of each other (e.g., 25 to 50, 25 to 45, 25 to 40, 25 to 35, 25 to 30, 30 to 55, 30 to 50, 30 to 45, 30 to 40, 30 to 35, 35 to 55, 35 to 50, 35 to 45, 35 to 40, 40 to 55, 40 to 50, 40 to 45 bp) and no more than 100 bp away from each other (e.g., no more than 90, 80, 70, 60, 50, 40, 30, 20, 10 or 5 bp away from each other). In an embodiment, the cleavage site is between 0-100 bp (e.g., 0 to 75, 0 to 50, 0 to 25, 25 to 100, 25 to 75, 25 to 50, 50 to 100, 50 to 75 or 75 to 100 bp) away from the target position.

[0577] In one embodiment, two gRNAs, e.g., independently, unimolecular (or chimeric) or modular gRNA, are configured to position a double-strand break on both sides of a target position. In an alternate embodiment, three gRNAs, e.g., independently, unimolecular (or chimeric) or modular gRNA, are configured to position a double strand break (i.e., one gRNA complexes with a Cas9 nuclease) and two single strand breaks or paired single stranded breaks (i.e., two gRNAs complex with Cas9 nickases) on either side of the target position (e.g., the first gRNA is used to target upstream (i.e., 5′) of the target position and the second gRNA is used to target downstream (i.e., 3′) of the target position). In another embodiment, four gRNAs, e.g., independently, unimolecular (or chimeric) or modular gRNA, are configured to generate two pairs of single stranded breaks (i.e., two pairs of two gRNAs complex with Cas9 nickases) on either side of the target position (e.g., the first gRNA is used to target upstream (i.e., 5′) of the target position and the second gRNA is used to target downstream (i.e., 3′) of the target position). The double strand break(s) or the closer of the two single strand nicks in a pair will ideally be within 0-500 bp of the target position (e.g., no more than 450, 400, 350, 300, 250, 200, 150, 100, 50 or 25 bp from the target position). When nickases are used, the two nicks in a pair are within 25-55 bp of each other (e.g., between 25 to 50, 25 to 45, 25 to 40, 25 to 35, 25 to 30, 50 to 55, 45 to 55, 40 to 55, 35 to 55, 30 to 55, 30 to 50, 35. to 50, 40 to 50, 45 to 50, 35 to 45, or 40 to 45 bp) and no more than 100 bp away from each other (e.g., no more than 90, 80, 70, 60, 50, 40, 30, 20 or 10 bp).

[0578] In one embodiment, two gRNAs, e.g., independently, unimolecular (or chimeric) or modular gRNA, are configured to position a double-strand break on both sides of a target position. In an alternate embodiment, three gRNAs, e.g., independently, unimolecular (or chimeric) or modular gRNA, are configured to position a double strand break (i.e., one gRNA complexes with a Cas9 nuclease) and two single strand breaks or paired single stranded breaks (i.e., two gRNAs complex with Cas9 nickases) on two target sequences (e.g., the first gRNA is used to target an upstream (i.e., 5′) target sequence and the second gRNA is used to target a downstream (i.e., 3′) target sequence of an insertion site. In another embodiment, four gRNAs, e.g., independently, unimolecular (or chimeric) or modular gRNA, are configured to generate two pairs of single stranded breaks (i.e., two pairs of two gRNAs complex with Cas9 nickases) on either side of an insertion site (e.g., the first gRNA is used to target an upstream (i.e., 5′) target sequence described herein, and the second gRNA is used to target a downstream (i.e., 3′) target sequence described herein). The double strand break(s) or the closer of the two single strand nicks in a pair will ideally be within 0-500 bp of the target position (e.g., no more than 450, 400, 350, 300, 250, 200, 150, 100, 50 or 25 bp from the target position). When nickases are used, the two nicks in a pair are within 25-55 bp of each other (e.g., between 25 to 50, 25 to 45, 25 to 40, 25 to 35, 25 to 30, 50 to 55, 45 to 55, 40 to 55, 35 to 55, 30 to 55, 30 to 50, 35 to 50, 40 to 50, 45 to 50, 35 to 45, or 40 to 45 bp) and no more than 100 bp away from each other (e.g., no more than 90, 80, 70, 60, 50, 40, 30, 20 or 10 bp).

[0579] Length of the Homology Arms

[0580] The homology arm should extend at least as far as the region in which end resection may occur, e.g., in order to allow the resected single stranded overhang to find a complementary region within the donor template. The overall length could be limited by parameters such as plasmid size or viral packaging limits. In an embodiment, a homology arm does not extend into repeated elements, e.g., ALU repeats, LINE repeats. A template may have two homology arms of the same or different lengths.

[0581] Exemplary homology arm lengths include at least 25, 50, 100, 250, 500, 750 or 1000 nucleotides.

[0582] Target position, as used herein, refers to a site on a target nucleic acid (e.g., the chromosome) that is modified by a Cas9 molecule-dependent process. For example, the target position can be a modified Cas9 molecule cleavage of the target nucleic acid and template nucleic acid directed modification, e.g., correction, of the target position. In an embodiment, a target position can be a site between two nucleotides, e.g., adjacent nucleotides, on the target nucleic acid into which one or more nucleotides is added. The target position may comprise one or more nucleotides that are altered, e.g., corrected, by a template nucleic acid. In an embodiment, the target position is within a target sequence (e.g., the sequence to which the gRN A binds). In an embodiment, a target position is upstream or downstream of a target sequence (e.g., the sequence to which the gRNA binds).

[0583] Typically, the template sequence undergoes a breakage mediated or catalyzed recombination with the target sequence. In an embodiment, the template nucleic acid includes sequence that corresponds to a site on the target sequence that is cleaved by a Cas9 mediated cleavage event. In an embodiment, the template nucleic acid includes sequence that corresponds to both, a first site on the target sequence that is cleaved in a first Cas9 mediated event, and a second site on the target sequence that is cleaved in a second Cas9 mediated event.

[0584] In an embodiment, the template nucleic acid can include sequence which results in an alteration in the coding sequence of a translated sequence, e.g., one which results in the substitution of one amino acid for another in a protein product, e.g., transforming a mutant allele into a wild type allele, transforming a wild type allele into a mutant allele, and/or introducing a stop codon, insertion of an amino acid residue, deletion of an amino acid residue, or a nonsense mutation.

[0585] In other embodiments, the template nucleic acid can include sequence which results in an alteration in a non-coding sequence, e.g., an alteration in an exon or in a 5′ or 3′ non-translated or non-transcribed region. Such alterations include an alteration in a control element, e.g., a promoter, enhancer, and an alteration in a cis-acting or trans-acting control element.

[0586] The template nucleic acid can include sequence which, when integrated, results in: decreasing the activity of a positive control element;
[0587] increasing the activity of a positive control element;
[0588] decreasing the activity of a negative control element;
[0589] increasing the activity of a negative control element;
[0590] decreasing the expression of a gene;
[0591] increasing the expression of a gene;
[0592] increasing resistance to a disorder or disease;
[0593] increasing resistance to viral entry;
[0594] correcting a mutation or altering an unwanted amino acid residue;
[0595] conferring, increasing, abolishing or decreasing a biological property of a gene product, e.g., increasing the enzymatic activity of an enzyme, or increasing the ability of a gene product to interact with another molecule.

[0596] The template nucleic acid can include sequence which results in:
[0597] a change in sequence of 1, 2, 3, 4, 5, 6, 7, 8, 9, 10, 1 1, 12 or more nucleotides of the target sequence.

[0598] In an embodiment, the template nucleic acid is 20+/−10, 30+/−10, 40+/−10, 50+1-10, 60+/−10, 70+/−10, 80+/−10, 90+/−10, 100+/−10, 1 10+/−10, 120+/−10, 130+/−10, 140+/−10, 150+1-10, 160+/−10, 170+/−10, 1 80+/−10, 190+/−10, 200+/−10, 210+/−10, 220+/−10, 200-300, 300-400, 400-500, 500-600, 600-700, 700-800, 800-900, 900-1000, 1000-2000, 2000-3000 or more than 3000 nucleotides in length.

[0599] A template nucleic acid comprises the following components: [5′ homology arm]-[insertion sequence]-[3′ homology arm].

[0600] The homology arms provide for recombination into the chromosome, which can replace the undesired element, e.g., a mutation or signature, with the replacement sequence. In an embodiment, the homology arms flank the most distal cleavage sites.

[0601] In an embodiment, the 3′ end of the 5′ homology arm is the position next to the 5′ end of the replacement sequence. In an embodiment, the 5′ homology arm can extend at least 10, 20, 30, 40, 50, 60, 70, 80, 90, 100, 120, 150, 180, 200, 300, 400, 500, 600, 700, 800, 900, 1000, 1500, or 2000 nucleotides 5′ from the 5′ end of the replacement sequence.

[0602] In an embodiment, the 5′ end of the 3′ homology arm is the position next to the 3′ end of the replacement sequence. In an embodiment, the 3′ homology arm can extend at least 10, 20, 30, 40, 50, 60, 70, 80, 90, 100, 120, 150, 180, 200, 300, 400, 500, 600, 700, 800, 900, 1000, 1500, or 2000 nucleotides 3′ from the 3′ end of the replacement sequence.

[0603] It is contemplated herein that one or both homology arms may be shortened to avoid including certain sequence repeat elements, e.g., Alu repeats, LINE elements. For example, a 5′ homology arm may be shortened to avoid a sequence repeat element. In other embodiments, a 3′ homology arm may be shortened to avoid a sequence repeat element. In some embodiments, both the 5′ and the 3′ homology arms may be shortened to avoid including certain sequence repeat elements.

[0604] It is contemplated herein that template nucleic acids for correcting a mutation may designed for use as a single-stranded oligonucleotide (ssODN). When using a ssODN, 5′ and 3′ homology arms may range up to about 200 base pairs (bp) in length, e.g., at least 25, 50, 75, 100, 125, 150, 175, or 200 bp in length. Longer homology arms are also contemplated for ssODNs as improvements in oligonucleotide synthesis continue to be made.

[0605] NHEJ Approaches for Gene Targeting

[0606] As described herein, nuclease-induced non-homologous end-joining (NHEJ) can be used to target gene-specific knockouts. Nuclease-induced NHEJ can also be used to remove (e.g., delete) sequence in a gene of interest.

[0607] While not wishing to be bound by theory, it is believed that, in an embodiment, the genomic alterations associated with the methods described herein rely on nuclease-induced NHEJ and the error-prone nature of the NHEJ repair pathway. NHEJ repairs a double-strand break in the DNA by joining together the two ends; however, generally, the original sequence is restored only if two compatible ends, exactly as they were formed by the double-strand break, are perfectly ligated. The DNA ends of the double-strand break are frequently the subject of enzymatic processing, resulting in the addition or removal of nucleotides, at one or both strands, prior to rejoining of the ends. This results in the presence of insertion and/or deletion (indel) mutations in the DNA sequence at the site of the NHEJ repair. Two-thirds of these mutations may alter the reading frame and, therefore, produce a non-functional protein. Additionally, mutations that maintain the reading frame, but which insert or delete a significant amount of sequence, can destroy functionality of the protein. This is locus dependent as mutations in critical functional domains are likely less tolerable than mutations in non-critical regions of the protein.

[0608] The indel mutations generated by NHEJ are unpredictable in nature; however, at a given break site certain indel sequences are favored and are over represented in the population. The lengths of deletions can vary widely; most commonly in the 1-50 bp range, but they can easily reach greater than 100-200 bp. Insertions tend to be shorter and often include short duplications of the sequence immediately surrounding the break site. However, it is possible to obtain large insertions, and in these cases, the inserted sequence has often been traced to other regions of the genome or to plasmid DNA present in the cells.

[0609] Because NHEJ is a mutagenic process, it can also be used to delete small sequence motifs as long as the generation of a specific final sequence is not required. If a double-strand break is targeted near to a short target sequence, the deletion mutations caused by the NHEJ repair often span, and therefore remove, the unwanted nucleotides. For the deletion of larger DNA segments, introducing two double-strand breaks, one on each side of the sequence, can result in NHEJ between the ends with removal of the entire intervening sequence. Both of these approaches can be used to delete specific DNA sequences; however, the error-prone nature of NHEJ may still produce indel mutations at the site of repair.

[0610] Both double strand cleaving Cas9 molecules and single strand, or nickase, Cas9 molecules can be used in the methods and compositions described herein to generate NHEJ-mediated indels. NHEJ-mediated indels targeted to the gene, e.g., a coding region, e.g., an early coding region of a gene of interest can be used to knockout (i.e., eliminate expression of) a gene of interest. For example, early coding region of a gene of interest includes sequence immediately following a transcription start site, within a first exon of the coding sequence, or within 500 bp of the transcription start site (e.g., less than 500, 450, 400, 350, 300, 250, 200, 150, 100 or 50 bp).

[0611] Placement of Double Strand or Single Strand Breaks Relative to the Target Position

[0612] In an embodiment, in which a gRNA and Cas9 nuclease generate a double strand break for the purpose of inducing NHEJ-mediated indels, a gRNA, e.g., a unimolecular (or chimeric) or modular gRNA molecule, is configured to position one double-strand break in close proximity to a nucleotide of the target position. In an embodiment, the cleavage site is between 0-500 bp away from the target position (e.g., less than 500, 400, 300, 200, 100, 50, 40, 30, 25, 20, 15, 10, 9, 8, 7, 6, 5, 4, 3, 2 or 1 bp from the target position).

[0613] In an embodiment, in which two gRNAs complexing with Cas9 nickases induce two single strand breaks for the purpose of inducing NHEJ-mediated indels, two gRNAs, e.g., independently, unimolecular (or chimeric) or modular gRNA, are configured to position two single-strand breaks to provide for NHEJ repair a nucleotide of the target position. In an embodiment, the gRNAs are configured to position cuts at the same position, or within a few nucleotides of one another, on different strands, essentially mimicking a double strand break. In an embodiment, the closer nick is between 0-30 bp away from the target position (e.g., less than 30, 25, 20, 1, 10, 9, 8, 7, 6, 5, 4, 3, 2 or 1 bp from the target position), and the two nicks are within 25-55 bp of each other (e.g., between 25 to 50, 25 to 45, 25 to 40, 25 to 35, 25 to 30, 50 to 55, 45 to 55, 40 to 55, 35 to 55, 30 to 55, 30 to 50, 35 to 50, 40 to 50, 45 to 50, 35 to 45, or 40 to 45 bp) and no more than 100 bp away from each other (e.g., no more than 90, 80, 70, 60, 50, 40, 30, 20 or 10 bp). In an embodiment, the gRNAs are configured to place a single strand break on either side of a nucleotide of the target position.

[0614] Both double strand cleaving Cas9 molecules and single strand, or nickase, Cas9 molecules can be used in the methods and compositions described herein to generate breaks both sides of a target position. Double strand or paired single strand breaks may be generated on both sides of a target position to remove the nucleic acid sequence between the two cuts (e.g., the region between the two breaks is deleted). In one embodiment, two gRNAs, e.g., independently, unimolecular (or chimeric) or modular gRNA, are configured to position a double-strand break on both sides of a target position (e.g., the first gRNA is used to target upstream (i.e., 5′) of the mutation in a gene or pathway described herein, and the second gRNA is used to target downstream (i.e., 3′) of the mutation in a gene or pathway described herein). In an alternate embodiment, three gRNAs, e.g., independently, unimolecular (or chimeric) or modular gRNA, are configured to position a double strand break (i.e., one gRNA complexes with a Cas9 nuclease) and two single strand breaks or paired single stranded breaks (i.e., two gRNAs complex with Cas9 nickases) on either side of a target position (e.g., the fu st gRNA is used to target upstream (i.e., 5′) of the mutation in a gene or pathway described herein, and the second gRNA is used to target downstream (i.e., 3′) of the mutation in a gene or pathway described herein). In another embodiment, four gRNAs, e.g., independently, unimolecular (or chimeric) or modular gRNA, are configured to generate two pairs of single stranded breaks (i.e., two pairs of two gRNAs complex with Cas9 nickases) on either side of the target position (e.g., the first gRNA is used to target upstream (i.e., 5′) of the mutation in a gene or pathway described herein, and the second gRNA is used to target downstream (i.e., 3′) of the mutation in a gene or pathway described herein). The double strand break(s) or the closer of the two single strand nicks in a pair will ideally be within 0-500 bp of the target position (e.g., no more than 450, 400, 350, 300, 250, 200, 150, 100, 50 or 25 bp from the target position). When nickases are used, the two nicks in a pair are within 25-55 bp of each other (e.g., between 25 to 50, 25 to 45, 25 to 40, 25 to 35, 25 to 30, 50 to 55, 45 to 55, 40 to 55, 35 to 55, 30 to 55, 30 to 50, 35 to 50, 40 to 50, 45 to 50, 35 to 45, or 40 to 45 bp) and no more than 100 bp away from each other (e.g., no more than 90, 80, 70, 60, 50, 40, 30, 20 or 10 bp).

[0615] In other embodiments, the insertion of template nucleic acid may be mediated by microhomology end joining (MMEJ). See, e.g., Saksuma et al., “MMEJ-assisted gene knock-in using TALENs and CRISPR-Cas9 with the PITCh systems.” Nature Protocols 11, 118-133 (2016) doi:10.1038/nprot.2015.140 Published online 17 Dec. 2015, the contents of which are incorporated by reference in their entirety.

[0616] VIII. Systems Comprising More than One gRNA Molecule

[0617] While not intending to be bound by theory, it has been surprisingly shown herein that the targeting of two target sequences (e.g., by two gRNA molecule/Cas9 molecule complexes which each induce a single- or double-strand break at or near their respective target sequences) located in close proximity on a continuous nucleic acid induces excision (e.g., deletion) of the nucleic acid sequence (or at least 80%, 85%, 90%, 95%, 96%, 97%, 98%, 99% of the nucleic acid sequence) located between the two target sequences. In some aspects, the present disclosure provides for the use of two or more gRNA molecules that comprise targeting domains targeting target sequences in close proximity on a continuous nucleic acid, e.g., a chromosome, e.g., a gene or gene locus, including its introns, exons and regulatory elements. The use may be, for example, by introduction of the two or more gRNA molecules, together with one or more Cas9 molecules (or nucleic acid encoding the two or more gRNA molecules and/or the one or more Cas9 molecules) into a cell.

[0618] In some aspects, the target sequences of the two or more gRNA molecules are located at least 5, 6, 7, 8, 9, 10, 20, 30, 40, 50, 60, 70, 80, 90, 100, 200, 300, 400, 500, 600, 700, 800, 900, 1000, 2000, 3000, 4000, 5000, 6000, 7000, 8000, 9000, 10,000, 11,000, 12,000, 13,000, 14,000, or 15,000 nucleotides apart on a continuous nucleic acid, but not more than 25,000 nucleotides apart on a continuous nucleic acid. In an embodiment, the target sequences are located about 4000 nucleotides apart. In an embodiment, the target sequences are located about 6000 nucleotides apart.

[0619] In some aspects, the plurality of gRNA molecules each target sequences within the same gene or gene locus. In another aspect, the plurality of gRNA molecules each target sequences within 2 or more different genes.

[0620] In some aspects, the invention provides compositions and cells comprising a plurality, for example, 2 or more, for example, 2, gRNA molecules of the invention, wherein the plurality of gRNA molecules target sequences less than 15,000, less than 14,000, less than 13,000, less than 12,000, less than 11,000, less than 10,000, less than 9,000, less than 8,000, less than 7,000, less than 6,000, less than 5,000, less than 4,000, less than 3,000, less than 2,000, less than 1,000, less than 900, less than 800, less than 700, less than 600, less than 500, less than 400, less than 300, less than 200, less than 100, less than 90, less than 80, less than 70, less than 60, less than 50, less than 40, or less than 30 nucleotides apart. In an embodiment, the target sequences are on the same strand of duplex nucleic acid. In an embodiment, the target sequences are on different strands of duplex nucleic acid.

[0621] In one embodiment, the invention provides a method for excising (e.g., deleting) nucleic acid disposed between two gRNA binding sites disposed less than 25,000, less than 20,000, less than 15,000, less than 14,000, less than 13,000, less than 12,000, less than 11,000, less than 10,000, less than 9,000, less than 8,000, less than 7,000, less than 6,000, less than 5,000, less than 4,000, less than 3,000, less than 2,000, less than 1,000, less than 900, less than 800, less than 700, less than 600, less than 500, less than 400, less than 300, less than 200, less than 100, less than 90, less than 80, less than 70, less than 60, less than 50, less than 40, or less than 30 nucleotides apart on the same or different strands of duplex nucleic acid. In an embodiment, the method provides for deletion of more than 50%, more than 60%, more than 70%, more than 80%, more than 85%, more than 86%, more than 87%, more than 88%, more than 89%, more than 90%, more than 91%, more than 92%, more than 93%, more than 94%, more than 95%, more than 96%, more than 97%, more than 98%, more than 99%, or 100% of the nucleotides disposed between the PAM sites associated with each gRNA binding site. In embodiments, the deletion further comprises of one or more nucleotides within one or more of the PAM sites associated with each gRNA binding site. In embodiments, the deletion also comprises one or more nucleotides outside of the region between the PAM sites associated with each gRNA binding site.

[0622] In one aspect, the two or more gRNA molecules comprise targeting domains targeting target sequences flanking a gene regulatory element, e.g., a promotor binding site, an enhancer region, or a repressor region, such that excision of the intervening sequence (or a portion of the intervening sequence) causes up- or down-regulation of a gene of interest.

[0623] In an embodiment, the two or more gRNA molecules include targeting domains comprising, e.g., consisting of, a targeting domain sequence of Table 1 or Table 5. In aspects, the two or more gRNA molecules comprise targeting domains that are complementary with sequences in the same gene. In aspects, the two or more gRNA molecules comprise targeting domains that are complementary with sequences of different genes. In an embodiment, the two or more gRNA molecules include targeting domains comprising, e.g., consisting of, a targeting domain sequence of Table 6. In an embodiment, the two or more gRNA molecules include targeting domains comprising, e.g., consisting of, a targeting domain sequence of Table 2, Table 7, Table 8 and/or Table 9. In aspects, the two or more gRNA molecules comprise targeting domains that are complementary with sequences in the same gene. In aspects, the two or more gRNA molecules comprise targeting domains that are complementary with sequences of different genes. In an embodiment, the two or more gRNA molecules are selected from the gRNA molecules of Table 7, Table 8 and/or Table 9. In an embodiment, the first and second gRNA molecules comprise targeting domains comprising, e.g., consisting of, targeting domain sequences selected from Tables 1-9, and are selected from different tables, e.g., and comprise targeting domains that are complementary with sequences of different genes.

[0624] In one aspect, the two or more gRNA molecules comprise targeting domains targeting target sequences flanking a gene regulatory element, e.g., a promotor binding site, an enhancer region, or a repressor region, such that excision of the intervening sequence (or a portion of the intervening sequence) causes up- or down-regulation of a gene of interest. By way of example, the two or more gRNA molecules comprise targeting domains targeting target sequences flanking a GATA1 binding site (or portion thereof) or TAL1 binding site (or portion thereof) of the erythroid enhancer region of the BCL11a gene (e.g., within the +55, +58 or +62 region). In other embodiments, the gRNA molecule or molecules do not result in a disruption of the GATA1 binding site or TAL1 binding site within the BCL11a Enhancer.

[0625] In an embodiment, the two or more gRNA molecules comprise targeting domains that comprise, e.g., consist of, targeting domains selected from Table 1. In an embodiment, the two or more gRNA molecules comprise targeting domains that comprise, e.g., consist of, targeting domains selected from Table 2. In an embodiment, the two or more gRNA molecules comprise targeting domains that comprise, e.g., consist of, targeting domains selected from Table 3. In an embodiment, the two or more gRNA molecules comprise targeting domains that comprise, e.g., consist of, targeting domains selected from Table 4. In an embodiment, the two or more gRNA molecules comprise targeting domains that comprise, e.g., consist of, targeting domains selected from Table 5. In an embodiment, the two or more gRNA molecules comprise targeting domains that comprise, e.g., consist of, targeting domains selected from Table 6. In an embodiment, the two or more gRNA molecules comprise targeting domains that comprise, e.g., consist of, targeting domains selected from Table 7. In an embodiment, the two or more gRNA molecules comprise targeting domains that comprise, e.g., consist of, targeting domains selected from Table 8. In an embodiment, the two or more gRNA molecules comprise targeting domains that comprise, e.g., consist of, targeting domains selected from Table 9.

[0626] In aspects, the two or more gRNA molecules comprise targeting domains comprising, e.g., consisting of the targeting domain sequence pairs listed in section II, above.

[0627] Without being bound by theory, it is believed that increasing the expression of fetal hemoglobin (e.g., gamma globin) while simultaneously reducing or eliminating expression of beta globin (e.g., beta globin comprising a sickling mutation), will result in increased efficacy in treating a hemoglobinopathy, e.g., sickle cell disease. Thus, in one aspect, the two or more gRNA molecules comprise a first gRNA molecule that causes an increase in gamma globin expression and a second gRNA molecule that reduces or eliminates expression of beta globin, e.g., beta globin carrying a sickle cell mutation. In embodiments, the two or more gRNA molecules comprise a first gRNA molecule that targets a sequence within a BCL11a enhancer region, e.g., as described herein, e.g., a gRNA molecule comprising a targeting domain comprising, e.g., consisting of, a targeting domain of Table 7, Table 8 or Table 9, and a second gRNA molecule that targets a sequence of a sickle globin gene (e.g., a beta globin gene comprising a sickling mutation).

[0628] IX. Properties of the gRNA

[0629] It has further been surprisingly shown herein that gRNA molecules and CRISPR systems comprising said gRNA molecules produce similar or identical indel patterns across multiple experiments using the same cell type, method of delivery and crRNA/tracr components. Without being bound by theory, it is believed that some indel patterns may be more advantageous than others. For example, indels which predominantly include insertions and/or deletions which result in a “frameshift mutation” (e.g., 1- or 2-base pair insertion or deletions, or any insertion or deletion where n/3 is not a whole number (where n=the number of nucleotides in the insertion or deletion)) may be beneficial in reducing or eliminating expression of a functional protein. Likewise, indels which predominantly include “large deletions” (deletions of more than 10, 11, 12, 13, 14, 15, 20, 25, or 30 nucleotides) may also be beneficial in, for example, removing critical regulatory sequences such as promoter binding sites, which may similarly have an improved effect on expression of functional protein. While the indel patterns induced by a given gRNA/CRISPR system have surprisingly been found to be consistently reproduced across cell types, as described herein, not any single indel structure will inevitably be produced in a given cell upon introduction of a gRNA/CRISPR system.

[0630] The invention thus provides for gRNA molecules which create a beneficial indel pattern or structure, for example, which have indel patterns or structures predominantly composed of frameshift mutation(s) and/or large deletions. Such gRNA molecules may be selected by assessing the indel pattern or structure created by a candidate gRNA molecule in a test cell (for example, a HEK293 cell) or in the cell of interest, e.g., a HSPC cell by NGS, as described herein. As shown in the Examples, gRNA molecules have been discovered, which, when introduced into the desired cell population, result in a population of cells comprising a significant fraction of the cells having a frameshift mutation in the targeted gene. In some cases, the rate of frameshift mutation is as high as 75%, 80%, 85%, 90% or more. The invention thus provides for populations of cells which comprise at least about 40% of cells (e.g., at least about 45%, at least about 50%, at least about 55%, at least about 60%, at least about 65%, at least about 70%, at least about 75%, at least about 80%, at least about 85%, at least about 90%, at least about 95%, or at least about 99%) having a frameshift mutation, e.g., as described herein, at or near the target site of a gRNA molecule described herein. The invention also provides for populations of cells which comprise at least about 50% of cells (e.g., at least about 55%, at least about 60%, at least about 65%, at least about 70%, at least about 75%, at least about 80%, at least about 85%, at least about 90%, at least about 95%, or at least about 99%) having a frameshift mutation, e.g., as described herein, at or near the target site of a gRNA molecule described herein.

[0631] The invention thus provides methods of selecting gRNA molecules for use in the therapeutic methods of the invention comprising: 1) providing a plurality of gRNA molecules to a target of interest, 2) assessing the indel pattern or structure created by use of said gRNA molecules, 3) selecting a gRNA molecule that forms an indel pattern or structure composed predominantly of frameshift mutations, large deletions or a combination thereof, and 4) using said selected gRNA in a methods of the invention.

[0632] The invention further provides methods of altering cells, and altered cells, wherein a particular indel pattern is constantly produced with a given gRNA/CRISPR system in that cell type. The indel patterns, including the top 5 most frequently occurring indels observed with the gRNA/CRISPR systems described herein are disclosed, for example, in the Examples. As shown in the examples, populations of cells are generated, wherein a significant fraction of the cells comprises one of the top 5 indels (for example, populations of cells wherein one of the top 5 indels is present in more than 30%, more than 40%, more than 50%, more than 60% or more of the cells of the population. Thus, the invention provides cells, e.g., HSPCs (as described herein), which comprise an indel of any one of the top 5 indels observed with a given gRNA/CRISPR system. Further, the invention provides populations of cells, e.g., HSPCs (as described herein), which when assessed by, for example, NGS, comprise a high percentage of cells comprising one of the top 5 indels described herein for a given gRNA/CRISPR system. When used in connection with indel pattern analysis, a “high percentage” refers to at least about 50% (e.g., at least about 55%, at least about 60%, at least about 65%, at least about 70%, at least about 75%, at least about 80%, at least about 85%, at least about 90%, at least about 95%, or at least about 99%) of the cells of the population comprising one of the top 5 indels described herein for a given gRNA/CRISPR system. In other embodiments, the population of cells comprises at least about 25% (e.g., from about 25% to about 60%, e.g., from about 25% to about 50%, e.g., from about 25% to about 40%, e.g., from about 25% to about 35%) of cells which have one of the top 5 indels described herein for a given gRNA/CRISPR system. In embodiments, the top indels, e.g., top 5 indels for a given gRNA/CRISPR system which targets a +58 region of the BCL11a enhancer are provided in Table 15, FIG. 25, and Table 37. In embodiments, the top indels, e.g., top 5 indels for a given gRNA/CRISPR system which targets a HPFH region are provided in Table 26, Table 27 and Table 37.

[0633] It has also been discovered that certain gRNA molecules do not create indels at off-target sequences within the genome of the target cell type, or produce indels at off target sites at very low frequencies (e.g., <5% of cells within a population) relative to the frequency of indel creation at the target site. Thus, the invention provides for gRNA molecules and CRISPR systems which do not exhibit off-target indel formation in the target cell type, or which produce a frequency of off-target indel formation of <5%. In embodiments, the invention provides gRNA molecules and CRISPR systems which do not exhibit any off target indel formation in the target cell type. Thus, the invention further provides a cell, e.g., a population of cells, e.g., HSPCs, e.g., as described herein, which comprise an indel at or near a target site of a gRNA molecule described herein (e.g., a frameshift indel, or any one of the top 5 indels produced by a given gRNA/CRISPR system, e.g., as described herein), but does not comprise an indel at any off-target site of the gRNA molecule. In other embodiments, the invention further provides a a population of cells, e.g., HSPCs, e.g., as described herein, which comprises >50% of cells which have an indel at or near a target site of a gRNA molecule described herein (e.g., a frameshift indel, or any one of the top 5 indels produced by a given gRNA/CRISPR system, e.g., as described herein), but which comprises less than 5%, e.g., less than 4%, less than 3%, less than 2% or less than 1%, of cells comprising an indel at any off-target site of the gRNA molecule.

[0634] In embodiments, the indel produced by a CRISPR system described herein (e.g., a CRISPR system comprising a gRNA molecule described herein), does not comprise a nucleotide of a GATA-1 binding site and/or does not comprise a nucleotide of a TAL-1 binding site (e.g., does not comprise a nucleotide of a GATA-1 binding site and/or TAL-1 binding site described in FIG. 25).

[0635] X. Delivery/Constructs

[0636] The components, e.g., a Cas9 molecule or gRNA molecule, or both, can be delivered, formulated, or administered in a variety of forms. As a non-limiting example, the gRNA molecule and Cas9 molecule can be formulated (in one or more compositions), directly delivered or administered to a cell in which a genome editing event is desired. Alternatively, nucleic acid encoding one or more components, e.g., a Cas9 molecule or gRNA molecule, or both, can be formulated (in one or more compositions), delivered or administered. In one aspect, the gRNA molecule is provided as DNA encoding the gRNA molecule and the Cas9 molecule is provided as DNA encoding the Cas9 molecule. In one embodiment, the gRNA molecule and Cas9 molecule are encoded on separate nucleic acid molecules. In one embodiment, the gRNA molecule and Cas9 molecule are encoded on the same nucleic acid molecule. In one aspect, the gRNA molecule is provided as RNA and the Cas9 molecule is provided as DNA encoding the Cas9 molecule. In one embodiment, the gRNA molecule is provided with one or more modifications, e.g., as described herein. In one aspect, the gRNA molecule is provided as RNA and the Cas9 molecule is provided as mRNA encoding the Cas9 molecule. In one aspect, the gRNA molecule is provided as RNA and the Cas9 molecule is provided as a protein. In one embodiment, the gRNA and Cas9 molecule are provided as a ribonuclear protein complex (RNP). In one aspect, the gRNA molecule is provided as DNA encoding the gRNA molecule and the Cas9 molecule is provided as a protein.

[0637] Delivery, e.g., delivery of the RNP, (e.g., to HSPC cells as described herein) may be accomplished by, for example, electroporation (e.g., as known in the art) or other method that renders the cell membrane permeable to nucleic acid and/or polypeptide molecules. In embodiments, the CRISPR system, e.g., the RNP as described herein, is delivered by electroporation using a 4D-Nucleofector (Lonza), for example, using program CM-137 on the 4D-Nucleofector (Lonza). In embodiments, the CRISPR system, e.g., the RNP as described herein, is delivered by electroporation using a voltage from about 800 volts to about 2000 volts, e.g., from about 1000 volts to about 1800 volts, e.g., from about 1200 volts to about 1800 volts, e.g., from about 1400 volts to about 1800 volts, e.g., from about 1600 volts to about 1800 volts, e.g., about 1700 volts, e.g., at a voltage of 1700 volts. In embodiments, the pulse width/length is from about 10 ms to about 50 ms, e.g., from about 10 ms to about 40 ms, e.g., from about 10 ms to about 30 ms, e.g., from about 15 ms to about 25 ms, e.g., about 20 ms, e.g., 20 ms. In embodiments, 1, 2, 3, 4, 5, or more, e.g., 2, e.g., 1 pulses are used. In an embodiment, the CRISPR system, e.g., the RNP as described herein, is delivered by electroporation using a voltage of about 1700 volts (e.g., 1700 volts), a pulse width of about 20 ms (e.g., 20 ms), using a single (1) pulse. In embodiments, electroporation is accomplished using a Neon electroporator. Additional techniques for rendering the membrane permeable are known in the art and include, for example, cell squeezing (e.g., as described in WO2015/023982 and WO2013/059343, the contents of which are hereby incorporated by reference in their entirety), nanoneedles (e.g., as described in Chiappini et al., Nat. Mat., 14; 532-39, or US2014/0295558, the contents of which are hereby incorporated by reference in their entirety) and nanostraws (e.g., as described in Xie, ACS Nano, 7(5); 4351-58, the contents of which are hereby incorporated by reference in their entirety).

[0638] When a component is delivered encoded in DNA the DNA will typically include a control region, e.g., comprising a promoter, to effect expression. Useful promoters for Cas9 molecule sequences include CMV, EF-1alpha, MSCV, PGK, CAG control promoters. Useful promoters for gRNAs include H1, EF-1a and U6 promoters. Promoters with similar or dissimilar strengths can be selected to tune the expression of components. Sequences encoding a Cas9 molecule can comprise a nuclear localization signal (NLS), e.g., an SV40 NLS. In an embodiment, a promoter for a Cas9 molecule or a gRNA molecule can be, independently, inducible, tissue specific, or cell specific.

[0639] DNA-Based Delivery of a Cas9 Molecule and or a gRNA Molecule

[0640] DNA encoding Cas9 molecules and/or gRNA molecules, can be administered to subjects or delivered into cells by art-known methods or as described herein. For example, Cas9-encoding and/or gRNA-encoding DNA can be delivered, e.g., by vectors (e.g., viral or non-viral vectors), non-vector based methods (e.g., using naked DNA or DNA complexes), or a combination thereof.

[0641] In some embodiments, the Cas9- and/or gRNA-encoding DNA is delivered by a vector (e.g., viral vector/virus, plasmid, minicircle or nanoplasmid).

[0642] A vector can comprise a sequence that encodes a Cas9 molecule and/or a gRNA molecule. A vector can also comprise a sequence encoding a signal peptide (e.g., for nuclear localization, nucleolar localization, mitochondrial localization), fused, e.g., to a Cas9 molecule sequence. For example, a vector can comprise one or more nuclear localization sequence (e.g., from SV40) fused to the sequence encoding the Cas9 molecule.

[0643] One or more regulatory/control elements, e.g., a promoter, an enhancer, an intron, a polyadenylation signal, a Kozak consensus sequence, internal ribosome entry sites (IRES), a 2A sequence, and a splice acceptor or donor can be included in the vectors. In some embodiments, the promoter is recognized by RNA polymerase II (e.g., a CMV promoter). In other embodiments, the promoter is recognized by RNA polymerase III (e.g., a U6 promoter). In some embodiments, the promoter is a regulated promoter (e.g., inducible promoter). In other embodiments, the promoter is a constitutive promoter. In some embodiments, the promoter is a tissue specific promoter. In some embodiments, the promoter is a viral promoter. In other embodiments, the promoter is a non-viral promoter.

[0644] In some embodiments, the vector or delivery vehicle is a minicircle. In some embodiments, the vector or delivery vehicle is a nanoplasmid.

[0645] In some embodiments, the vector or delivery vehicle is a viral vector (e.g., for generation of recombinant viruses). In some embodiments, the virus is a DNA virus (e.g., dsDNA or ssDNA virus). In other embodiments, the virus is an RNA virus (e.g., an ssRNA virus).

[0646] Exemplary viral vectors/viruses include, e.g., retroviruses, lentiviruses, adenovirus, adeno-associated virus (AAV), vaccinia viruses, poxviruses, and herpes simplex viruses. Viral vector technology is well known in the art and is described, for example, in Sambrook et al., 2012, MOLECULAR CLONING: A LABORATORY MANUAL, volumes 1-4, Cold Spring Harbor Press, NY), and in other virology and molecular biology manuals.

[0647] In some embodiments, the virus infects dividing cells. In other embodiments, the virus infects non-dividing cells. In some embodiments, the virus infects both dividing and non-dividing cells. In some embodiments, the virus can integrate into the host genome. In some embodiments, the virus is engineered to have reduced immunity, e.g., in human. In some embodiments, the virus is replication-competent. In other embodiments, the virus is replication-defective, e.g., having one or more coding regions for the genes necessary for additional rounds of virion replication and/or packaging replaced with other genes or deleted. In some embodiments, the virus causes transient expression of the Cas9 molecule and/or the gRNA molecule. In other embodiments, the virus causes long-lasting, e.g., at least 1 week, 2 weeks, 1 month, 2 months, 3 months, 6 months, 9 months, 1 year, 2 years, or permanent expression, of the Cas9 molecule and/or the gRNA molecule. The packaging capacity of the viruses may vary, e.g., from at least about 4 kb to at least about 30 kb, e.g., at least about 5 kb, 10 kb, 15 kb, 20 kb, 25 kb, 30 kb, 35 kb, 40 kb, 45 kb, or 50 kb.

[0648] In some embodiments, the Cas9- and/or gRNA-encoding DNA is delivered by a recombinant retrovirus. In some embodiments, the retrovirus (e.g., Moloney murine leukemia vims) comprises a reverse transcriptase, e.g., that allows integration into the host genome. In some embodiments, the retrovirus is replication-competent. In other embodiments, the retrovirus is replication-defective, e.g., having one of more coding regions for the genes necessary for additional rounds of virion replication and packaging replaced with other genes, or deleted.

[0649] In some embodiments, the Cas9- and/or gRNA-encoding DNA is delivered by a recombinant lentivirus. For example, the lentivirus is replication-defective, e.g., does not comprise one or more genes required for viral replication.

[0650] In some embodiments, the Cas9- and/or gRNA-encoding DNA is delivered by a recombinant adenovirus. In some embodiments, the adenovirus is engineered to have reduced immunity in human.

[0651] In some embodiments, the Cas9- and/or gRNA-encoding DNA is delivered by a recombinant AAV. In some embodiments, the AAV can incorporate its genome into that of a host cell, e.g., a target cell as described herein. In some embodiments, the AAV is a self-complementary adeno-associated virus (scAAV), e.g., a scAAV that packages both strands which anneal together to form double stranded DNA. AAV serotypes that may be used in the disclosed methods include, e.g., AAV 1, AAV2, modified AAV2 (e.g., modifications at Y444F, Y500F, Y730F and/or S662V), AAV3, modified AAV3 (e.g., modifications at Y705F, Y731 F and/or. T492V), AAV4, AAV5, AAV6, modified AAV6 (e.g., modifications at S663V and/or T492V), AAV8. AAV 8.2, AAV9, AAV rh 10, and pseudotyped AAV, such as AAV2/8, AAV2/5 and AAV2/6 can also be used in the disclosed methods.

[0652] In some embodiments, the Cas9- and/or gRNA-encoding DNA is delivered by a hybrid virus, e.g., a hybrid of one or more of the viruses described herein.

[0653] A Packaging cell is used to form a virus particle that is capable of infecting a host or target cell. Such a cell includes a 293 cell, which can package adenovirus, and a γ2 cell or a PA317 cell, which can package retrovirus. A viral vector used in gene therapy is usually generated by a producer cell line that packages a nucleic acid vector into a viral particle. The vector typically contains the minimal viral sequences required for packaging and subsequent integration into a host or target cell (if applicable), with other viral sequences being replaced by an expression cassette encoding the protein to be expressed. For example, an AAV vector used in gene therapy typically only possesses inverted terminal repeat (ITR) sequences from the AAV genome which are required for packaging and gene expression in the host or target cell. The missing viral functions are supplied in trans by the packaging cell line. Henceforth, the viral DNA is packaged in a cell line, which contains a helper plasmid encoding the other AAV genes, namely rep and cap, but lacking ITR sequences. The cell line is also infected with adenovirus as a helper. The helper virus promotes replication of the AAV vector and expression of AAV genes from the helper plasmid. The helper plasmid is not packaged in significant amounts due to a lack of ITR sequences. Contamination with adenovirus can be reduced by, e.g., heat treatment to which adenovirus is more sensitive than AAV.

[0654] In an embodiment, the viral vector has the ability of cell type and/or tissue type recognition. For example, the viral vector can be pseudotyped with a different/alternative viral envelope glycoprotein; engineered with a cell type-specific receptor (e.g., genetic modification of the viral envelope glycoproteins to incorporate targeting ligands such as a peptide ligand, a single chain antibodie, a growth factor); and/or engineered to have a molecular bridge with dual specificities with one end recognizing a viral glycoprotein and the other end recognizing a moiety of the target cell surface (e.g., ligand-receptor, monoclonal antibody, avidin-biotin and chemical conjugation).

[0655] In an embodiment, the viral vector achieves cell type specific expression. For example, a tissue-specific promoter can be constructed to restrict expression of the transgene (Cas 9 and gRNA) in only the target cell. The specificity of the vector can also be mediated by microRNA-dependent control of transgene expression. In an embodiment, the viral vector has increased efficiency of fusion of the viral vector and a target cell membrane. For example, a fusion protein such as fusion-competent hemagglutin (HA) can be incorporated to increase viral uptake into cells. In an embodiment, the viral vector has the ability of nuclear localization. For example, aviruse that requires the breakdown of the cell wall (during cell division) and therefore will not infect a non-diving cell can be altered to incorporate a nuclear localization peptide in the matrix protein of the virus thereby enabling the transduction of non-proliferating cells.

[0656] In some embodiments, the Cas9- and/or gRNA-encoding DNA is delivered by a non-vector based method (e.g., using naked DNA or DNA complexes). For example, the DNA can be delivered, e.g., by organically modified silica or silicate (Ormosil), electroporation, gene gun, sonoporation, magnetofection, lipid-mediated transfection, dendrimers, inorganic nanoparticles, calcium phosphates, or a combination thereof.

[0657] In some embodiments, the Cas9- and/or gRNA-encoding DNA is delivered by a combination of a vector and a non-vector based method. For example, a virosome comprises a liposome combined with an inactivated virus (e.g., HIV or influenza virus), which can result in more efficient gene transfer, e.g., in a respiratory epithelial cell than either a viral or a liposomal method alone.

[0658] In an embodiment, the delivery vehicle is a non-viral vector. In an embodiment, the non-viral vector is an inorganic nanoparticle (e.g., attached to the payload to the surface of the nanoparticle). Exemplary inorganic nanoparticles include, e.g., magnetic nanoparticles (e.g., Fe 1vln0₂), or silica. The outer surface of the nanoparticle can be conjugated with a positively charged polymer (e.g., polyethylenimine, polylysine, polyserine) which allows for attachment (e.g., conjugation or entrapment) of payload. In an embodiment, the non-viral vector is an organic nanoparticle (e.g., entrapment of the payload inside the nanoparticle). Exemplary organic nanoparticles include, e.g., SNALP liposomes that contain cationic lipids together with neutral helper lipids which are coated with polyethylene glycol (PEG) and protamine and nucleic acid complex coated with lipid coating.

[0659] Exemplary lipids and/or polymers for for transfer of CRISPR systems or nucleic acid, e.g., vectors, encoding CRISPR systems or components thereof include, for example, those described in WO2011/076807, WO2014/136086, WO2005/060697, WO2014/140211, WO2012/031046, WO2013/103467, WO2013/006825, WO2012/006378, WO2015/095340, and WO2015/095346, the contents of each of the foregoing are hereby incorporated by reference in their entirety. In an embodiment, the vehicle has targeting modifications to increase target cell update of nanoparticles and liposomes, e.g., cell specific antigens, monoclonal antibodies, single chain antibodies, aptamers, polymers, sugars, and cell penetrating peptides. In an embodiment, the vehicle uses fusogenic and endosome-destabilizing peptides/polymers. In an embodiment, the vehicle undergoes acid-triggered conformational changes (e.g., to accelerate endosomal escape of the cargo). In an embodiment, a stimuli-cleavable polymer is used, e.g., for release in a cellular compartment. For example, disulfide-based cationic polymers that are cleaved in the reducing cellular environment can be used.

[0660] In an embodiment, the delivery vehicle is a biological non-viral delivery vehicle. In an embodiment, the vehicle is an attenuated bacterium (e.g., naturally or artificially engineered to be invasive but attenuated to prevent pathogenesis and expressing the transgene (e.g., Listeria monocytogenes, certain Salmonella strains, Bifidobacterium longum, and modified Escherichia coli), bacteria having nutritional and tissue-specific tropism to target specific tissues, bacteria having modified surface proteins to alter target tissue specificity). In an embodiment, the vehicle is a genetically modified bacteriophage (e.g., engineered phages having large packaging capacity, less immunogenic, containing mammalian plasmid maintenance sequences and having incorporated targeting ligands). In an embodiment, the vehicle is a mammalian virus-like particle. For example, modified viral particles can be generated (e.g., by purification of the “empty” particles followed by ex vivo assembly of the virus with the desired cargo). The vehicle can also be engineered to incorporate targeting ligands to alter target tissue specificity. In an embodiment, the vehicle is a biological liposome. For example, the biological liposome is a phospholipid-based particle derived from human cells (e.g., erythrocyte ghosts, which are red blood cells broken down into spherical structures derived from the subject (e.g., tissue targeting can be achieved by attachment of various tissue or cell-specific ligands), or secretory exosomes—subject (i.e., patient) derived membrane-bound nanovescicle (30-100 nm) of endocytic origin (e.g., can be produced from various cell types and can therefore be taken up by cells without the need of for targeting ligands).

[0661] In an embodiment, one or more nucleic acid molecules (e.g., DNA molecules) other than the components of a Cas system, e.g., the Cas9 molecule component and/or the gRNA molecule component described herein, are delivered. In an embodiment, the nucleic acid molecule is delivered at the same time as one or more of the components of the Cas system are delivered. In an embodiment, the nucleic acid molecule is delivered before or after (e.g., less than about 30 minutes, 1 hour, 2 hours, 3 hours, 6 hours, 9 hours, 12 hours, 1 day, 2 days, 3 days, 1 week, 2 weeks, or 4 weeks) one or more of the components of the Cas9 system are delivered. In an embodiment, the nucleic acid molecule is delivered by a different means than one or more of the components of the Cas9 system, e.g., the Cas9 molecule component and/or the gRNA molecule component, are delivered. The nucleic acid molecule can be delivered by any of the delivery methods described herein. For example, the nucleic acid molecule can be delivered by a viral vector, e.g., an integration-deficient lentivirus, and the Cas9 molecule component and/or the gRNA molecule component can be delivered by electroporation, e.g., such that the toxicity caused by nucleic acids (e.g., DNAs) can be reduced. In an embodiment, the nucleic acid molecule encodes a therapeutic protein, e.g., a protein described herein. In an embodiment, the nucleic acid molecule encodes an RNA molecule, e.g., an RNA molecule described herein. Delivery of RNA encoding a Cas9 molecule

[0662] RNA encoding Cas9 molecules (e.g., active Cas9 molecules, inactive Cas9 molecules or inactive Cas9 fusion proteins) and/or gRNA molecules, can be delivered into cells, e.g., target cells described herein, by art-known methods or as described herein. For example, Cas9-encoding and/or gRNA-encoding RNA can be delivered, e.g., by microinjection, electroporation, lipid-mediated transfection, peptide-mediated delivery, or a combination thereof.

[0663] Delivery of Cas9 Molecule as Protein

[0664] Cas9 molecules (e.g., active Cas9 molecules, inactive Cas9 molecules or inactive Cas9 fusion proteins) can be delivered into cells by art-known methods or as described herein. For example, Cas9 protein molecules can be delivered, e.g., by microinjection, electroporation, lipid-mediated transfection, peptide-mediated delivery, cell squeezing or abrasion (e.g., by nanoneedles) or a combination thereof. Delivery can be accompanied by DNA encoding a gRNA or by a gRNA, e.g., by precomplexing the gRNA and the Cas9 protein in a ribonuclear protein complex (RNP).

[0665] In an aspect the Cas9 molecule, e.g., as described herein, is delivered as a protein and the gRNA molecule is delivered as one or more RNAs (e.g., as a dgRNA or sgRNA, as described herein). In embodiments, the Cas9 protein is complexed with the gRNA molecule prior to delivery to a cell, e.g., as described herein, as a ribonuclear protein complex (“RNP”). In embodiments, the RNP can be delivered into cells, e.g., described herein, by any art-known method, e.g., electroporation. As described herein, and without being bound by theory, it can be preferable to use a gRNA molecule and Cas9 molecule which result in high % editing at the target sequence (e.g., >85%, >90%, >95%, >98%, or >99%) in the target cell, e.g., described herein, even when the concentration of RNP delivered to the cell is reduced. Again, without being bound by theory, delivering a reduced or low concentration of RNP comprising a gRNA molecule that produces a high % editing at the target sequence in the target cell (including at the low RNP concentration), can be beneficial because it may reduce the frequency and number of off-target editing events. In one aspect, where a low or reduced concentration of RNP is to be used, the following exemplary procedure can be used to generate the RNP with a dgRNA molecule:
[0666] 1. Provide the Cas9 molecule and the tracr in solution at a high concentration (e.g., a concentration higher than the final RNP concentration to be delivered to the cell), and allow the two components to equilibrate;
[0667] 2. Provide the crRNA molecule, and allow the components to equilibrate (thereby forming a high-concentration solution of the RNP);
[0668] 3. Dilute the RNP solution to the desired concentration;
[0669] 4. Deliver said RNP at said desired concentration to the target cells, e.g., by electroporation.

[0670] The above procedure may be modified for use with sgRNA molecules by omitting step 2, above, and in step 1, providing the Cas9 molecule and the sgRNA molecule in solution at high concentration, and allowing the components to equilibrate. In embodiments, the Cas9 molecule and each gRNA component are provided in solution at a 1:2 ratio (Cas9:gRNA), e.g., a 1:2 molar ratio of Cas9:gRNA molecule. Where dgRNA molecules are used, the ratio, e.g., molar ratio, is 1:2:2 (Cas9:tracr:crRNA). In embodiments, the RNP is formed at a concentration of 20 uM or higher, e.g., a concentration from about 20 uM to about 50 uM. In embodiments, the RNP is formed at a concentration of 10 uM or higher, e.g., a concentration from about 10 uM to about 30 uM. In embodiments, the RNP is diluted to a final concentration of 10 uM or less (e.g., a concentration from about 0.01 uM to about 10 uM) in a solution comprising the target cell (e.g., described herein) for delivery to said target cell. In embodiments, the RNP is diluted to a final concentration of 3 uM or less (e.g., a concentration from about 0.01 uM to about 3 uM) in a solution comprising the target cell (e.g., described herein) for delivery to said target cell. In embodiments, the RNP is diluted to a final concentration of 1 uM or less (e.g., a concentration from about 0.01 uM to about 1 uM) in a solution comprising the target cell (e.g., described herein) for delivery to said target cell. In embodiments, the RNP is diluted to a final concentration of 0.3 uM or less (e.g., a concentration from about 0.01 uM to about 0.3 uM) in a solution comprising the target cell (e.g., described herein) for delivery to said target cell. In embodiments, the RNP is provided at a final concentration of about 3 uM in a solution comprising the target cell (e.g., described herein) for delivery to said target cell. In embodiments, the RNP is provided at a final concentration of about 1 uM in a solution comprising the target cell (e.g., described herein) for delivery to said target cell. In embodiments, the RNP is provided at a final concentration of about 0.3 uM in a solution comprising the target cell (e.g., described herein) for delivery to said target cell. In embodiments, the RNP is provided at a final concentration of about 0.1 uM in a solution comprising the target cell (e.g., described herein) for delivery to said target cell. In embodiments, the RNP is provided at a final concentration of about 0.05 uM in a solution comprising the target cell (e.g., described herein) for delivery to said target cell. In embodiments, the RNP is provided at a final concentration of about 0.03 uM in a solution comprising the target cell (e.g., described herein) for delivery to said target cell. In embodiments, the RNP is provided at a final concentration of about 0.01 uM in a solution comprising the target cell (e.g., described herein) for delivery to said target cell. In embodiments, the RNP is formulated in a medium suitable for electroporation. In embodiments, the RNP is delivered to cells, e.g., HSPC cells, e.g., as described herein, by electroporation, e.g., using electroporation conditions described herein.

[0671] Bi-Modal or Differential Delivery of Components

[0672] Separate delivery of the components of a Cas system, e.g., the Cas9 molecule component and the gRNA molecule component, and more particularly, delivery of the components by differing modes, can enhance performance, e.g., by improving tissue specificity and safety.

[0673] In an embodiment, the Cas9 molecule and the gRNA molecule are delivered by different modes, or as sometimes referred to herein as differential modes. Different or differential modes, as used herein, refer modes of delivery that confer different pharmacodynamic or pharmacokinetic properties on the subject component molecule, e.g., a Cas9 molecule, gRNA molecule, or template nucleic acid. For example, the modes of delivery can result in different tissue distribution, different half-life, or different temporal distribution, e.g., in a selected compartment, tissue, or organ.

[0674] Some modes of delivery, e.g., delivery by a nucleic acid vector that persists in a cell, or in progeny of a cell, e.g., by autonomous replication or insertion into cellular nucleic acid, result-in more persistent expression of and presence of a component.

[0675] XI. Methods of Treatment

[0676] The Cas9 systems, e.g., one or more gRNA molecules and one or more Cas9 molecules, described herein are useful for the treatment of disease in a mammal, e.g., in a human. The terms “treat,” “treated,” “treating,” and “treatment,” include the administration of cas9 systems, e.g., one or more gRNA molecules and one or more cas9 molecules, to cells to prevent or delay the onset of the symptoms, complications, or biochemical indicia of a disease, alleviating the symptoms or arresting or inhibiting further development of the disease, condition, or disorder. Treatment may also include the administration of one or more (e.g., a population of) cells, e.g., HSPCs, that have been modified by the introduction of a gRNA molecule (or more than one gRNA molecule) of the present invention, or by the introduction of a CRISPR system as described herein, or by any of the methods of preparing said cells described herein, to prevent or delay the onset of the symptoms, complications, or biochemical indicia of a disease, alleviating the symptoms or arresting or inhibiting further development of the disease, condition, or disorder.

[0677] Treatment may be prophylactic (to prevent or delay the onset of the disease, or to prevent the manifestation of clinical or subclinical symptoms thereof) or therapeutic suppression or alleviation of symptoms after the manifestation of the disease. Treatment can be measured by the therapeutic measures described herein. Thus, the methods of “treatment” of the present invention also include administration of cells altered by the introduction of a cas9 system (e.g., one or more gRNA molecules and one or more Cas9 molecules) into said cells to a subject in order to cure, reduce the severity of, or ameliorate one or more symptoms of a disease or condition, in order to prolong the health or survival of a subject beyond that expected in the absence of such treatment. For example, “treatment” includes the alleviation of a disease symptom in a subject by at least 5%, 6%, 7%, 8%, 9%, 10%, 11%, 12%, 13%, 14%, 15%, 16%, 17%, 18%, 19%, 20%, 25%, 30%, 35%, 40%, 45%, 50%, 55%, 60%, 65%, 70%, 75%, 80%, 85%, 90%, 95% or more.

[0678] Cas9 systems comprising gRNA molecules comprising the targeting domains described herein, e.g., in Tables 1, 2, 3, 4, 5, 6, 7, 8, and/or 9, are useful for the treatment of hemoglobinopathies.

[0679] Hemoglobinopathies

[0680] Hemoglobinopathies encompass a number of anemias of genetic origin in which there is a decreased production and/or increased destruction (hemolysis) of red blood cells (RBCs). These also include genetic defects that result in the production of abnormal hemoglobins with a concomitant impaired ability to maintain oxygen concentration. Some such disorders involve the failure to produce normal β-globin in sufficient amounts, while others involve the failure to produce normal β-globin entirely. These disorders associated with the β-globin protein are referred to generally as β-hemoglobinopathies. For example, β-thalassemias result from a partial or complete defect in the expression of the β-globin gene, leading to deficient or absent HbA. Sickle cell anemia results from a point mutation in the β-globin structural gene, leading to the production of an abnormal (sickle) hemoglobin (HbS). HbS is prone to polymerization, particularly under deoxygenated conditions. HbS RBCs are more fragile than normal RBCs and undergo hemolysis more readily, leading eventually to anemia.

[0681] In an embodiment, a genetic defect in alpha globin or beta globin is corrected, e.g., by homologous recombination, using the Cas9 molecules and gRNA molecules, e.g., CRISPR systems, described herein.

[0682] In an embodiment, a gene encoding a wild type (e.g., non-mutated) copy of alpha globin or beta globin is inserted into the genome of the cell, e.g., at a safe harbor site, e.g., at an AAVS1 safe harbor site, by homologous recombination, using a CRISPR system and methods described herein.

[0683] In an embodiment, a hemoglobinopathies-associated gene is targeted, using the Cas9 molecule and gRNA molecule described herein. Exemplary targets include, e.g., genes associated with control of the gamma-globin genes. In an embodiment, the target is BCL11A. In an embodiment, the target is a BCL11a enhancer. In an embodiment, the target is a HPFH region.

[0684] Fetal hemoglobin (also hemoglobin F or HbF or α2γ2) is a tetramer of two adult alpha-globin polypeptides and two fetal beta-like gamma-globin polypeptides. HbF is the main oxygen transport protein in the human fetus during the last seven months of development in the uterus and in the newborn until roughly 6 months old. Functionally, fetal hemoglobin differs most from adult hemoglobin in that it is able to bind oxygen with greater affinity than the adult form, giving the developing fetus better access to oxygen from the mother's bloodstream.

[0685] In newborns, fetal hemoglobin is nearly completely replaced by adult hemoglobin by approximately 6 months postnatally. In adults, fetal hemoglobin production can be reactivated pharmacologically, which is useful in the treatment of diseases such as hemoglobinopathies. For example, in certain patients with hemoglobinopathies, higher levels of gamma-globin expression can partially compensate for defective or impaired beta-globin gene production, which can ameliorate the clinical severity in these diseases. Increased HbF levels or F-cell (HbF containing erythrocyte) numbers can ameliorate the disease severity of hemoglobinopathies, e.g., beta-thalassemia major and sickle cell anemia.

[0686] Increased HbF levels or F-cell can be associated reduced BCL11A expression in cells. The BCL11A gene encodes a multi-zinc finger transcription factor. In an embodiment, the expression of BCL11A is modulated, e.g., down-regulated. In an embodiment, the BCL11A gene is edited. In an embodiment, the function of BCL11a, e.g., in an erythroid lineage cell, is impaired or down-regulated. In an embodiment, the cell is a hemopoietic stem cell or progenitor cell.

[0687] Sickle Cell Diseases

[0688] Sickle cell disease is a group of disorders that affects hemoglobin. People with this disorder have atypical hemoglobin molecules (hemoglobin S), which can distort red blood cells into a sickle, or crescent, shape. Characteristic features of this disorder include a low number of red blood cells (anemia), repeated infections, and periodic episodes of pain.

[0689] Mutations in the HBB gene cause sickle cell disease. T e HBB gene provides instructions for making beta-globin. Various versions of beta-globin result from different mutations in the HBB gene. One particular HBB gene mutation produces an abnormal version of beta-globin known as hemoglobin S (HbS). Other mutations in the HBB gene lead to additional abnormal versions of beta-globin such as hemoglobin C (HbC) and hemoglobin E (HbE). HBB gene mutations can also result in an unusually low level of beta-globin, i.e., beta thalassemia.

[0690] In people with sickle cell disease, at least one of the beta-globin subunits in hemoglobin is replaced with hemoglobin S. In sickle cell anemia, which is a common form of sickle cell disease, hemoglobin S replaces both beta-globin subunits in hemoglobin. In other types of sickle cell disease, just one beta-globin subunit in hemoglobin is replaced with hemoglobin S. The other beta-globin subunit is replaced with a different abnormal variant, such as hemoglobin C. For example, people with sickle-hemoglobin C (HbSC) disease have hemoglobin molecules with hemoglobin S and hemoglobin C instead of beta-globin. If mutations that produce hemoglobin S and beta thalassemia occur together, individuals have hemoglobin S-beta thalassemia (HbSBetaThal) disease.

[0691] Beta Thalassemia

[0692] Beta thalassemia is a blood disorder that reduces the production of hemoglobin. In people with beta thalassemia, low levels of hemoglobin lead to a lack of oxygen in many parts of the body. Affected individuals also have a shortage of red blood cells (anemia), which can cause pale skin, weakness, fatigue, and more serious complications. People with beta thalassemia are at an increased risk of developing abnormal blood clots.

[0693] Beta thalassemia is classified into two types depending on the severity of symptoms: thalassemia major (also known as Cooley's anemia) and thalassemia intermedia. Of the two types, thalassemia major is more severe.

[0694] Mutations in the HBB gene cause beta thalassemia. The HBB gene provides instructions for making beta-globin. Some mutations in the HBB gene prevent the production of any beta-globin. The absence of beta-globin is referred to as beta-zero (B°) thalassemia. Other HBB gene mutations allow some beta-globin to be produced but in reduced amounts, i.e., beta-plus (B⁺) thalassemia. People with both types have been diagnosed with thalassemia major and thalassemia intermedia.

[0695] In an embodiment, a Cas9 molecule/gRNA molecule complex targeting a first gene is used to treat a disorder characterized by second gene, e.g., a mutation in a second gene. By way of example, targeting of the first gene, e.g., by editing or payload delivery, can compensate for, or inhibit further damage from, the affect of a second gene, e.g., a mutant second gene. In an embodiment the allele(s) of the first gene carried by the subject is not causative of the disorder.

[0696] In one aspect, the invention relates to the treatment of a mammal, e.g., a human, in need of increased fetal hemoglobin (HbF).

[0697] In one aspect, the invention relates to the treatment of a mammal, e.g., a human, that has been diagnosed with, or is at risk of developing, a hemoglobinopathy.

[0698] In one aspect, the hemoglobinopathy is a β-hemoglobinopathy. In one aspect, the hemoglobinopathy is sickle cell disease. In one aspect, the hemoglobinopathy is beta thalassemia.

[0699] Methods of Treatment of Hemoglobinopathies

[0700] In another aspect the invention provides methods of treatment. In aspects, the gRNA molecules, CRISPR systems and/or cells of the invention are used to treat a patient in need thereof. In aspects, the patient is a mammal, e.g., a human. In aspects, the patient has a hemoglobinopathy. In embodiments, the patient has sickle cell disease. In embodiments, the patient has beta thalassemia.

[0701] In one aspect, the method of treatment comprises administering to a mammal, e.g., a human, one or more gRNA molecules, e.g., one or more gRNA molecules comprising a targeting domain described in Table 1, 2, 3, 4, 5, 6, 7, 8, or 9, and one or more cas9 molecules described herein.

[0702] In one aspect, the method of treatment comprises administering to a mammal a cell population, wherein the cell population is a cell population from a mammal, e.g., a human, that has been administered one or more gRNA molecules, e.g., one or more gRNA molecules comprising a targeting domain described in Table 1, 2, 3, 4, 5, 6, 7, 8, or 9, and one or more cas9 molecules described herein, e.g., a CRISPR system as described herein. In one embodiment, the administration of the one or more gRNA molecules or CRISPR systems to the cell is accomplished in vivo. In one embodiment the administration of the one or more gRNA molecules or CRISPR systems to the cell is accomplished ex vivo.

[0703] In one aspect, the method of treatment comprises administering to the mammal, e.g., the human, an effective amount of a cell population comprising cells which comprise or at one time comprised one or more gRNA molecules, e.g., one or more gRNA molecules comprising a targeting domain described in Table 1, 2, 3, 4, 5, 6, 7, 8, or 9, and one or more cas9 molecules described herein, or the progeny of said cells. In one embodiment, the cells are allogeneic to the mammal. In one embodiment, the cells are autologous to the mammal. In one embodiment the cells are harvested from the mammal, manipulated ex vivo, and returned to the mammal.

[0704] In aspects, the cells comprising or which at one time comprised one or more gRNA molecules, e.g., one or more gRNA molecules comprising a targeting domain described in Table 1, 2, 3, 4, 5, 6, 7, 8, or 9, and one or more cas9 molecules described herein, or the progeny of said cells, comprise stem cells or progenitor cells. In one aspect, the stem cells are hematopoietic stem cells. In one aspect, the progenitor cells are hematopoietic progenitor cells. In one aspect, the cells comprise both hematopoietic stem cells and hematopoietic progenitor cells, e.g., are HSPCs. In one aspect, the cells comprise, e.g., consist of, CD34+ cells. In one aspect the cells are substantially free of CD34− cells. In one aspect, the cells comprise, e.g., consist of, CD34+/CD90+ stem cells. In one aspect, the cells comprise, e.g., consist of, CD34+/CD90− cells. In an aspect, the cells are a population comprising one or more of the cell types described above or described herein.

[0705] In one embodiment, the disclosure provides a method for treating a hemoglobinopathy, e.g., sickle cell disease or beta-thalassemia, or a method for increasing fetal hemoglobin expression in a mammal, e.g., a human, in need thereof, the method comprising:
[0706] a) providing, e.g., harvesting or isolating, a population of HSPCs (e.g., CD34+ cells) from a mammal;
[0707] b) providing said cells ex vivo, e.g., in a cell culture medium, optionally in the presence of an effective amount of a composition comprising at least one stem cell expander, whereby said population of HSPCs (e.g., CD34+ cells) expands to a greater degree than an untreated population;
[0708] c) contacting the population of HSPCs (e.g., CD34+ cells) with an effective amount of: a composition comprising at least one gRNA molecule comprising a targeting domain described herein, e.g., a targeting domain described in Tables 1, 2, 3, 4, 5, 6, 7, 8, or 9, or a nucleic acid encoding said gRNA molecule, and at least one cas9 molecule, e.g., described herein, or a nucleic acid encoding said cas9 molecule, e.g., one or more RNPs as described herein, e.g., with a CRISPR system described herein;
[0709] d) causing at least one modification in at least a portion of the cells of the population (e.g., at least a portion of the HSPCs, e.g., CD34+ cells, of the population), whereby, e.g., when said HSPCs are differentiated into cells of an erythroid lineage, e.g., red blood cells, fetal hemoglobin expression is increased, e.g., relative to cells not contacted according to step c); and
[0710] f) returning a population of cells comprising said modified HSPCs (e.g., CD34+ cells) to the mammal.

[0711] In an aspect, the HSPCs are allogeneic to the mammal to which they are returned. In an aspect, the HSPCs are autologous to the mammal to which they are returned. In aspects, the HSPCs are isolated from bone marrow. In aspects, the HSPCs are isolated from peripheral blood, e.g., mobilized peripheral blood. In aspects, the mobilized peripheral blood is isolated from a subject who has been administered a G-CSF. In aspects, the mobilized peripheral blood is isolated from a subject who has been administered a mobilization agent other than G-CSF, for example, Plerixafor® (AMD3100). In aspects, the HSPCs are isolated from umbilical cord blood.

[0712] In further embodiments of the method, the method further comprises, after providing a population of HSPCs (e.g., CD34+ cells), e.g., from a source described above, the step of enriching the population of cells for HSPCs (e.g., CD34+ cells). In embodiments of the method, after said enriching, the population of cells, e.g., HSPCs, is substantially free of CD34− cells.

[0713] In embodiments, the population of cells which is returned to the mammal includes at least 70% viable cells. In embodiments, the population of cells which is returned to the mammal includes at least 75% viable cells. In embodiments, the population of cells which is returned to the mammal includes at least 80% viable cells. In embodiments, the population of cells which is returned to the mammal includes at least 85% viable cells. In embodiments, the population of cells which is returned to the mammal includes at least 90% viable cells. In embodiments, the population of cells which is returned to the mammal includes at least 95% viable cells. In embodiments, the population of cells which is returned to the mammal includes at least 99% viable cells. Viability can be determined by staining a representative portion of the population of cells for a cell viability marker, e.g., as known in the art.

[0714] In another embodiment, the disclosure provides a method for treating a hemoglobinopathy, e.g., sickle cell disease or beta-thalassemia, or a method for increasing fetal hemoglobin expression in a mammal, e.g., a human, in need thereof, the method comprising the steps of:
[0715] a) providing, e.g., harvesting or isolating, a population of HSPCs (e.g., CD34+ cells) of a mammal, e.g., from the bone marrow of a mammal;
[0716] b) isolating the CD34+ cells from the population of cells of step a);
[0717] c) providing said CD34+ cells ex vivo, and culturing said cells, e.g., in a cell culture medium, in the presence of an effective amount of a composition comprising at least one stem cell expander, e.g., Compound 4, e.g., Compound 4 at a concentration of about 0.5 to about 0.75 micromolar, whereby said population of CD34+ cells expands to a greater degree than an untreated population;
[0718] d) introducing into the cells of the population CD34+ cells an effective amount of: a composition comprising a Cas9 molecule, e.g., as described herein, and a gRNA molecule, e.g., as described herein, e.g., optionally where the Cas9 molecule and the gRNA molecule are in the form of an RNP, e.g., as described herein, and optionally where said introduction is by electroporation, e.g., as described herein, of said RNP into said cells;
[0719] e) causing at least one genetic modification in at least a portion of the cells of the population (e.g., at least a portion of the HSPCs, e.g., CD34+ cells, of the population), whereby an indel, e.g., as described herein, is created at or near the genomic site complementary to the targeting domain of the gRNA introduced in step d);
[0720] f) optionally, additionally culturing said cells after said introducing, e.g., in a cell culture medium, in the presence of an effective amount of a composition comprising at least one stem cell expander, e.g., Compound 4, e.g., Compound 4 at a concentration of about 0.5 to about 0.75 micromolar, such that the cells expand at least 2-fold, e.g., at least 4-fold, e.g., at least 5-fold;
[0721] g) cryopreserving said cells; and
[0722] h) returning the cells to the mammal, wherein,
   [0723] the cells returned to the mammal comprise cells that 1) maintain the ability to differentiate into cells of the erythroid lineage, e.g., red blood cells; 2) when differentiated into red blood cells, produce an increased level of fetal hemoglobin, e.g., relative to cells unmodified by the gRNA of step e), e.g., produce at least 6 picograms fetal hemoglobin per cell.

[0724] In an aspect, the HSPCs are allogeneic to the mammal to which they are returned. In an aspect, the HSPCs are autologous to the mammal to which they are returned. In aspects, the HSPCs are isolated from bone marrow. In aspects, the HSPCs are isolated from peripheral blood, e.g., mobilized peripheral blood. In aspects, the mobilized peripheral blood is isolated from a subject who has been administered a G-CSF. In aspects, the mobilized peripheral blood is isolated from a subject who has been administered a mobilization agent other than G-CSF, for example, Plerixafor® (AMD3100). In aspects, the HSPCs are isolated from umbilical cord blood.

[0725] In embodiments of the method above, the recited step b) results in a population of cells which is substantially free of CD34− cells.

[0726] In further embodiments of the method, the method further comprises, after providing a population of HSPCs (e.g., CD34+ cells), e.g., from a source described above, the population of cells is enriched for HSPCs (e.g., CD34+ cells).

[0727] In a further embodiments of these methods, the population of modified HSPCs (e.g., CD34+ stem cells) having the ability to differentiate increased fetal hemoglobin expression is cryopreserved and stored prior to being reintroduced into the mammal. In embodiments, the cryopreserved population of HSPCs having the ability to differentiate into cells of the erythroid lineage, e.g., red blood cells, and/or when differentiated into cells of the erythroid lineage, e.g., red blood cells, produce an increased level of fetal hemoglobin is thawed and then reintroduced into the mammal. In a further embodiment of these methods, the method comprises chemotherapy and/or radiation therapy to remove or reduce the endogenous hematopoietic progenitor or stem cells in the mammal. In a further embodiment of these methods, the method does not comprise a step of chemotherapy and/or radiation therapy to remove or reduce the endogenous hematopoietic progenitor or stem cells in the mammal. In a further embodiment of these methods, the method comprises a chemotherapy and/or radiation therapy to reduce partially (e.g., partial lymphodepletion) the endogenous hematopoietic progenitor or stem cells in the mammal. In embodiments the patient is treated with a fully lymphodepleting dose of busulfan prior to reintroduction of the modified HSPCs to the mammal. In embodiments, the patient is treated with a partially lymphodepleting dose of busulfan prior to reintroduction of the modified HSPCs to the mammal.

[0728] In embodiments, the cells are contacted with RNP comprising a Cas9 molecule, e.g., as described herein, complexed with a gRNA to the +58 BCL11a enhancer region. In embodiments, the gRNA comprises the targeting domain of CR000312. In embodiments, the gRNA comprises the targeting domain of CR000311. In embodiments, the gRNA comprises the targeting domain of CR001128. In embodiments, the gRNA comprises the targeting domain of CR001125. In embodiments, the gRNA comprises the targeting domain of CR001126. In embodiments, the gRNA comprises the targeting domain of CR001127. In embodiments the gRNA is a dual guide RNA comprising a crRNA comprising, e.g., consisting of, [SEQ ID NO: 248]-[SEQ ID NO: 6607], and a tracr comprising, e.g., consisting of, [SEQ ID NO: 7812], optionally with 1, 2, 3, 4, 5, 6, or 7 additional 3′ uracil nucleotides, e.g., SEQ ID NO: 6660. In embodiments, the gRNA is a sgRNA comprising, e.g., consisting of, [SEQ ID NO: 248]-[SEQ ID NO: 6601, optionally with 1, 2, 3, 4, 5, 6, or 7 additional 3′ uracil nucleotides, e.g., [SEQ ID NO: 248]-[SEQ ID NO: 7811]. In embodiments the gRNA is a dual guide RNA comprising a crRNA comprising, e.g., consisting of, [SEQ ID NO: 247]-[SEQ ID NO: 6607], and a tracr comprising, e.g., consisting of, SEQ ID NO: 7812, optionally with 1, 2, 3, 4, 5, 6, or 7 additional 3′ uracil nucleotides, e.g., SEQ ID NO: 6660. In embodiments, the gRNA is a sgRNA comprising, e.g., consisting of, [SEQ ID NO: 247]-[SEQ ID NO: 6601, optionally with 1, 2, 3, 4, 5, 6, or 7 additional 3′ uracil nucleotides, e.g., [SEQ ID NO: 247]-[SEQ ID NO: 7811]. In embodiments the gRNA is a dual guide RNA comprising a crRNA comprising, e.g., consisting of, [SEQ ID NO: 338]-[SEQ ID NO: 6607], and a tracr comprising, e.g., consisting of, SEQ ID NO: 7812, optionally with 1, 2, 3, 4, 5, 6, or 7 additional 3′ uracil nucleotides, e.g., SEQ ID NO: 6660. In embodiments, the gRNA is a sgRNA comprising, e.g., consisting of, [SEQ ID NO: 338]-[SEQ ID NO: 6601], optionally with 1, 2, 3, 4, 5, 6, or 7 additional 3′ uracil nucleotides, e.g., [SEQ ID NO: 338]-[SEQ ID NO: 7811]. In embodiments the gRNA is a dual guide RNA comprising a crRNA comprising, e.g., consisting of, [SEQ ID NO: 335]-[SEQ ID NO: 6607], and a tracr comprising, e.g., consisting of, SEQ ID NO: 7812, optionally with 1, 2, 3, 4, 5, 6, or 7 additional 3′ uracil nucleotides, e.g., SEQ ID NO: 6660. In embodiments, the gRNA is a sgRNA comprising, e.g., consisting of, [SEQ ID NO: 335]-[SEQ ID NO: 6601], optionally with 1, 2, 3, 4, 5, 6, or 7 additional 3′ uracil nucleotides, e.g., [SEQ ID NO: 335]-[SEQ ID NO: 7811]. In embodiments the gRNA is a dual guide RNA comprising a crRNA comprising, e.g., consisting of, [SEQ ID NO: 336]-[SEQ ID NO: 6607], and a tracr comprising, e.g., consisting of, SEQ ID NO: 7812, optionally with 1, 2, 3, 4, 5, 6, or 7 additional 3′ uracil nucleotides, e.g., SEQ ID NO: 6660. In embodiments, the gRNA is a sgRNA comprising, e.g., consisting of, [SEQ ID NO: 336]-[SEQ ID NO: 6601], optionally with 1, 2, 3, 4, 5, 6, or 7 additional 3′ uracil nucleotides, e.g., [SEQ ID NO: 336]-[SEQ ID NO: 7811]. In embodiments the gRNA is a dual guide RNA comprising a crRNA comprising, e.g., consisting of, [SEQ ID NO: 337]-[SEQ ID NO: 6607], and a tracr comprising, e.g., consisting of, SEQ ID NO: 7812, optionally with 1, 2, 3, 4, 5, 6, or 7 additional 3′ uracil nucleotides, e.g., SEQ ID NO: 6660. In embodiments, the gRNA is a sgRNA comprising, e.g., consisting of, [SEQ ID NO: 337]-[SEQ ID NO: 6601], optionally with 1, 2, 3, 4, 5, 6, or 7 additional 3′ uracil nucleotides, e.g., [SEQ ID NO: 337]-[SEQ ID NO: 7811]. In any of the aforementioned embodiments, any or all of the RNA components of the gRNA may be modified at one or more nucleotides, e.g., as described herein. In embodiments, the gRNA molecule is SEQ ID NO: 342. In embodiments, the gRNA molecule is SEQ ID NO: 343. In embodiments, the gRNA molecule is SEQ ID NO: 1762. In embodiments the gRNA molecule is a dgRNA molecule that consists of SEQ ID NO: 344 and SEQ ID NO: 6660. In embodiments the gRNA molecule is a dgRNA molecule that consists of SEQ ID NO: 344 and SEQ ID NO: 346. In embodiments the gRNA molecule is a dgRNA molecule that consists of SEQ ID NO: 345 and SEQ ID NO: 6660. In embodiments the gRNA molecule is a dgRNA molecule that consists of SEQ ID NO: 345 and SEQ ID NO: 346. In embodiments, the gRNA molecule is SEQ ID NO: 347. In embodiments, the gRNA molecule is SEQ ID NO: 348. In embodiments, the gRNA molecule is SEQ ID NO: 1763. In embodiments the gRNA molecule is a dgRNA molecule that consists of SEQ ID NO: 349 and SEQ ID NO: 6660. In embodiments the gRNA molecule is a dgRNA molecule that consists of SEQ ID NO: 349 and SEQ ID NO: 346. In embodiments the gRNA molecule is a dgRNA molecule that consists of SEQ ID NO: 350 and SEQ ID NO: 6660. In embodiments the gRNA molecule is a dgRNA molecule that consists of SEQ ID NO: 350 and SEQ ID NO: 346. In embodiments, the gRNA molecule is SEQ ID NO: 351. In embodiments, the gRNA molecule is SEQ ID NO: 352. In embodiments, the gRNA molecule is SEQ ID NO: 1764. In embodiments the gRNA molecule is a dgRNA molecule that consists of SEQ ID NO: 353 and SEQ ID NO: 6660. In embodiments the gRNA molecule is a dgRNA molecule that consists of SEQ ID NO: 353 and SEQ ID NO: 346. In embodiments the gRNA molecule is a dgRNA molecule that consists of SEQ ID NO: 354 and SEQ ID NO: 6660. In embodiments the gRNA molecule is a dgRNA molecule that consists of SEQ ID NO: 354 and SEQ ID NO: 346. In embodiments, the gRNA molecule is SEQ ID NO: 355. In embodiments, the gRNA molecule is SEQ ID NO: 356. In embodiments, the gRNA molecule is SEQ ID NO: 1765. In embodiments the gRNA molecule is a dgRNA molecule that consists of SEQ ID NO: 357 and SEQ ID NO: 6660. In embodiments the gRNA molecule is a dgRNA molecule that consists of SEQ ID NO: 357 and SEQ ID NO: 346. In embodiments the gRNA molecule is a dgRNA molecule that consists of SEQ ID NO: 358 and SEQ ID NO: 6660. In embodiments the gRNA molecule is a dgRNA molecule that consists of SEQ ID NO: 358 and SEQ ID NO: 346. In embodiments, the gRNA molecule is SEQ ID NO: 359. In embodiments, the gRNA molecule is SEQ ID NO: 360. In embodiments, the gRNA molecule is SEQ ID NO: 1766. In embodiments the gRNA molecule is a dgRNA molecule that consists of SEQ ID NO: 361 and SEQ ID NO: 6660. In embodiments the gRNA molecule is a dgRNA molecule that consists of SEQ ID NO: 361 and SEQ ID NO: 346. In embodiments the gRNA molecule is a dgRNA molecule that consists of SEQ ID NO: 362 and SEQ ID NO: 6660. In embodiments the gRNA molecule is a dgRNA molecule that consists of SEQ ID NO: 362 and SEQ ID NO: 346. In embodiments, the gRNA molecule is SEQ ID NO: 363. In embodiments, the gRNA molecule is SEQ ID NO: 364. In embodiments, the gRNA molecule is SEQ ID NO: 1767. In embodiments the gRNA molecule is a dgRNA molecule that consists of SEQ ID NO: 365 and SEQ ID NO: 6660. In embodiments the gRNA molecule is a dgRNA molecule that consists of SEQ ID NO: 365 and SEQ ID NO: 346. In embodiments the gRNA molecule is a dgRNA molecule that consists of SEQ ID NO: 366 and SEQ ID NO: 6660. In embodiments the gRNA molecule is a dgRNA molecule that consists of SEQ ID NO: 366 and SEQ ID NO: 346. In embodiments, the gRNA molecule is SEQ ID NO: 367. In embodiments, the gRNA molecule is SEQ ID NO: 368. In embodiments, the gRNA molecule is SEQ ID NO: 1768. In embodiments the gRNA molecule is a dgRNA molecule that consists of SEQ ID NO: 369 and SEQ ID NO: 6660. In embodiments the gRNA molecule is a dgRNA molecule that consists of SEQ ID NO: 369 and SEQ ID NO: 346. In embodiments the gRNA molecule is a dgRNA molecule that consists of SEQ ID NO: 370 and SEQ ID NO: 6660. In embodiments the gRNA molecule is a dgRNA molecule that consists of SEQ ID NO: 370 and SEQ ID NO: 346. In embodiments, the gRNA molecule is SEQ ID NO: 371. In embodiments, the gRNA molecule is SEQ ID NO: 372. In embodiments, the gRNA molecule is SEQ ID NO: 1769. In embodiments the gRNA molecule is a dgRNA molecule that consists of SEQ ID NO: 373 and SEQ ID NO: 6660. In embodiments the gRNA molecule is a dgRNA molecule that consists of SEQ ID NO: 373 and SEQ ID NO: 346. In embodiments the gRNA molecule is a dgRNA molecule that consists of SEQ ID NO: 374 and SEQ ID NO: 6660. In embodiments the gRNA molecule is a dgRNA molecule that consists of SEQ ID NO: 374 and SEQ ID NO: 346.

[0729] In embodiments, the cells are contacted with RNP comprising a Cas9 molecule, e.g., as described herein, complexed with a gRNA to the HPFH region. In embodiments, the gRNA comprises the targeting domain of CR001030. In embodiments, the gRNA comprises the targeting domain of CR001028. In embodiments, the gRNA comprises the targeting domain of CR001221. In embodiments, the gRNA comprises the targeting domain of CR001137. In embodiments, the gRNA comprises the targeting domain of CR003035. In embodiments, the gRNA comprises the targeting domain of CR003085. In embodiments the gRNA is a dual guide RNA comprising a crRNA comprising, e.g., consisting of, [SEQ ID NO: 98]-[SEQ ID NO: 6607], and a tracr comprising, e.g., consisting of, SEQ ID NO: 7812, optionally with 1, 2, 3, 4, 5, 6, or 7 additional 3′ uracil nucleotides, e.g., SEQ ID NO: 6660. In embodiments, the gRNA is a sgRNA comprising, e.g., consisting of, [SEQ ID NO: 98]-[SEQ ID NO: 6601], optionally with 1, 2, 3, 4, 5, 6, or 7 additional 3′ uracil nucleotides, e.g., [SEQ ID NO: 98]-[SEQ ID NO: 7811]. In embodiments the gRNA is a dual guide RNA comprising a crRNA comprising, e.g., consisting of, [SEQ ID NO: 100]-[SEQ ID NO: 6607], and a tracr comprising, e.g., consisting of, SEQ ID NO: 7812, optionally with 1, 2, 3, 4, 5, 6, or 7 additional 3′ uracil nucleotides, e.g., SEQ ID NO: 6660. In embodiments, the gRNA is a sgRNA comprising, e.g., consisting of, [SEQ ID NO: 100]-[SEQ ID NO: 6601], optionally with 1, 2, 3, 4, 5, 6, or 7 additional 3′ uracil nucleotides, e.g., [SEQ ID NO: 100]-[SEQ ID NO: 7811]. In embodiments the gRNA is a dual guide RNA comprising a crRNA comprising, e.g., consisting of, [SEQ ID NO: 1589]-[SEQ ID NO: 6607], and a tracr comprising, e.g., consisting of, SEQ ID NO: 7812, optionally with 1, 2, 3, 4, 5, 6, or 7 additional 3′ uracil nucleotides, e.g., SEQ ID NO: 6660. In embodiments, the gRNA is a sgRNA comprising, e.g., consisting of, [SEQ ID NO: 1589]-[SEQ ID NO: 6601], optionally with 1, 2, 3, 4, 5, 6, or 7 additional 3′ uracil nucleotides, e.g., [SEQ ID NO: 1589]-[SEQ ID NO: 7811]. In embodiments the gRNA is a dual guide RNA comprising a crRNA comprising, e.g., consisting of, [SEQ ID NO: 1505]-[SEQ ID NO: 6607], and a tracr comprising, e.g., consisting of, SEQ ID NO: 7812, optionally with 1, 2, 3, 4, 5, 6, or 7 additional 3′ uracil nucleotides, e.g., SEQ ID NO: 6660. In embodiments, the gRNA is a sgRNA comprising, e.g., consisting of, [SEQ ID NO: 1505]-[SEQ ID NO: 6601], optionally with 1, 2, 3, 4, 5, 6, or 7 additional 3′ uracil nucleotides, e.g., [SEQ ID NO: 1505]-[SEQ ID NO: 7811]. In embodiments the gRNA is a dual guide RNA comprising a crRNA comprising, e.g., consisting of, [SEQ ID NO: 1700]-[SEQ ID NO: 6607], and a tracr comprising, e.g., consisting of, SEQ ID NO: 7812, optionally with 1, 2, 3, 4, 5, 6, or 7 additional 3′ uracil nucleotides, e.g., SEQ ID NO: 6660. In embodiments, the gRNA is a sgRNA comprising, e.g., consisting of, [SEQ ID NO: 1700]-[SEQ ID NO: 6601], optionally with 1, 2, 3, 4, 5, 6, or 7 additional 3′ uracil nucleotides, e.g., [SEQ ID NO: 1700]-[SEQ ID NO: 7811]. In embodiments the gRNA is a dual guide RNA comprising a crRNA comprising, e.g., consisting of, [SEQ ID NO: 1750]-[SEQ ID NO: 6607], and a tracr comprising, e.g., consisting of, SEQ ID NO: 7812, optionally with 1, 2, 3, 4, 5, 6, or 7 additional 3′ uracil nucleotides, e.g., SEQ ID NO: 6660. In embodiments, the gRNA is a sgRNA comprising, e.g., consisting of, [SEQ ID NO: 1750]-[SEQ ID NO: 6601], optionally with 1, 2, 3, 4, 5, 6, or 7 additional 3′ uracil nucleotides, e.g., [SEQ ID NO: 1750]-[SEQ ID NO: 7811]. In embodiments, the gRNA molecule is SEQ ID NO: 375. In embodiments, the gRNA molecule is SEQ ID NO: 376. In embodiments, the gRNA molecule is SEQ ID NO: 1770. In embodiments the gRNA molecule is a dgRNA molecule that consists of SEQ ID NO: 377 and SEQ ID NO: 6660. In embodiments the gRNA molecule is a dgRNA molecule that consists of SEQ ID NO: 377 and SEQ ID NO: 346. In embodiments the gRNA molecule is a dgRNA molecule that consists of SEQ ID NO: 378 and SEQ ID NO: 6660. In embodiments the gRNA molecule is a dgRNA molecule that consists of SEQ ID NO: 378 and SEQ ID NO: 346. In embodiments, the gRNA molecule is SEQ ID NO: 379. In embodiments, the gRNA molecule is SEQ ID NO: 380. In embodiments, the gRNA molecule is SEQ ID NO: 1771. In embodiments the gRNA molecule is a dgRNA molecule that consists of SEQ ID NO: 381 and SEQ ID NO: 6660. In embodiments the gRNA molecule is a dgRNA molecule that consists of SEQ ID NO: 381 and SEQ ID NO: 346. In embodiments the gRNA molecule is a dgRNA molecule that consists of SEQ ID NO: 382 and SEQ ID NO: 6660. In embodiments the gRNA molecule is a dgRNA molecule that consists of SEQ ID NO: 382 and SEQ ID NO: 346. In embodiments, the gRNA molecule is SEQ ID NO: 383. In embodiments, the gRNA molecule is SEQ ID NO: 384. In embodiments, the gRNA molecule is SEQ ID NO: 1772. In embodiments the gRNA molecule is a dgRNA molecule that consists of SEQ ID NO: 385 and SEQ ID NO: 6660. In embodiments the gRNA molecule is a dgRNA molecule that consists of SEQ ID NO: 385 and SEQ ID NO: 346. In embodiments the gRNA molecule is a dgRNA molecule that consists of SEQ ID NO: 386 and SEQ ID NO: 6660. In embodiments the gRNA molecule is a dgRNA molecule that consists of SEQ ID NO: 386 and SEQ ID NO: 346. In embodiments, the gRNA molecule is SEQ ID NO: 387. In embodiments, the gRNA molecule is SEQ ID NO: 388. In embodiments, the gRNA molecule is SEQ ID NO: 1773. In embodiments the gRNA molecule is a dgRNA molecule that consists of SEQ ID NO: 389 and SEQ ID NO: 6660. In embodiments the gRNA molecule is a dgRNA molecule that consists of SEQ ID NO: 389 and SEQ ID NO: 346. In embodiments the gRNA molecule is a dgRNA molecule that consists of SEQ ID NO: 390 and SEQ ID NO: 6660. In embodiments the gRNA molecule is a dgRNA molecule that consists of SEQ ID NO: 390 and SEQ ID NO: 346. In embodiments, the gRNA molecule is SEQ ID NO: 391. In embodiments, the gRNA molecule is SEQ ID NO: 392. In embodiments, the gRNA molecule is SEQ ID NO: 1774. In embodiments the gRNA molecule is a dgRNA molecule that consists of SEQ ID NO: 393 and SEQ ID NO: 6660. In embodiments the gRNA molecule is a dgRNA molecule that consists of SEQ ID NO: 393 and SEQ ID NO: 346. In embodiments the gRNA molecule is a dgRNA molecule that consists of SEQ ID NO: 394 and SEQ ID NO: 6660. In embodiments the gRNA molecule is a dgRNA molecule that consists of SEQ ID NO: 394 and SEQ ID NO: 346. In embodiments, the gRNA molecule is SEQ ID NO: 395. In embodiments, the gRNA molecule is SEQ ID NO: 396. In embodiments, the gRNA molecule is SEQ ID NO: 1775. In embodiments the gRNA molecule is a dgRNA molecule that consists of SEQ ID NO: 397 and SEQ ID NO: 6660. In embodiments the gRNA molecule is a dgRNA molecule that consists of SEQ ID NO: 397 and SEQ ID NO: 346. In embodiments the gRNA molecule is a dgRNA molecule that consists of SEQ ID NO: 398 and SEQ ID NO: 6660. In embodiments the gRNA molecule is a dgRNA molecule that consists of SEQ ID NO: 398 and SEQ ID NO: 346.

[0730] In embodiments, the stem cell expander is Compound 1. In embodiments, the stem cell expander is Compound 2. In embodiments, the stem cell expander is Compound 3. In embodiments, the stem cell expander is Compound 4. In embodiments, the stem cell expander is Compound 4 and is present at a concentration of 2-0.1 micromolar, e.g., 1-0.25 micromolar, e.g., 0.75-0.5 micromolar. In embodiments, the stem cell expander is a molecule described in WO2010/059401 (e.g., the molecule described in Example 1 of WO2010/059401).

[0731] In embodiments, the cells, e.g., HSPCs, e.g., as described herein, are cultured ex vivo for a period of about 1 hour to about 15 days, e.g., a period of about 12 hours to about 12 days, e.g., a period of about 12 hours to 4 days, e.g., a period of about 1 day to about 4 days, e.g., a period of about 1 day to about 2 days, e.g., a period of about 1 day or a period of about 2 days, prior to the step of contacting the cells with a CRISPR system, e.g., described herein. In embodiments, said culturing prior to said contacting step is in a composition (e.g., a cell culture medium) comprising a stem cell expander, e.g., described herein, e.g., compound 4, e.g., compound 4 at a concentration of about 0.25 uM to about 1 uM, e.g., compound 4 at a concentration of about 0.75-0.5 micromolar. In embodiments, the cells are cultured ex vivo for a period of no more than about about 1 day, e.g., no more than about 18, 17, 16, 15, 14, 13, 12, 11, 10, 9, 8, 7, 6, 5, 4, 3, 2, or 1 hour(s) after the step of contacting the cells with a CRISPR system, e.g., described herein, e.g., in a cell culture medium which comprises a stem cell expander, e.g., described herein, e.g., compound 4, e.g., compound 4 at a concentration of about 0.25 uM to about 1 uM, e.g., compound 4 at a concentration of about 0.75-0.5 micromolar. In other embodiments, the cells are cultured ex vivo for a period of about 1 hour to about 15 days, e.g., a period of about 12 hours to about 10 days, e.g., a period of about 1 day to about 10 days, e.g., a period of about 1 day to about 5 days, e.g., a period of about 1 day to about 4 days, e.g., a period of about 2 days to about 4 days, e.g., a period of about 2 days, about 3 days or about 4 days, after the step of contacting the cells with a CRISPR system, e.g., described herein, in a cell culture medium, e.g., which comprises a stem cell expander, e.g., described herein, e.g., compound 4, e.g., compound 4 at a concentration of about 0.25 uM to about 1 uM, e.g., compound 4 at a concentration of about 0.75-0.5 micromolar. In embodiments, the cells are cultured ex vivo (e.g., cultured prior to said contacting step and/or cultured after said contacting step) for a period of about 1 hour to about 20 days, e.g., a period of about 6-12 days, e.g., a period of about 6, about 7, about 8, about 9, about 10, about 11, or about 12 days.

[0732] In embodiments, the population of cells comprising the modified HSPCs returned to the mammal comprises at least about 1 million cells (e.g., at least about 1 million CD34+ cells) per kg. In embodiments, the population of cells comprising the modified HSPCs returned to the mammal comprises at least about 2 million cells (e.g., at least about 2 million CD34+ cells) per kg. In embodiments, the population of cells comprising the modified HSPCs returned to the mammal comprises at least about 3 million cells (e.g., at least about 3 million CD34+ cells) per kg. In embodiments, the population of cells comprising the modified HSPCs returned to the mammal comprises at least about 4 million cells (e.g., at least about 4 million CD34+ cells) per kg. In embodiments, the population of cells comprising the modified HSPCs returned to the mammal comprises at least about 5 million cells (e.g., at least about 5 million CD34+ cells) per kg. In embodiments, the population of cells comprising the modified HSPCs returned to the mammal comprises at least about 6 million cells (e.g., at least about 6 million CD34+ cells) per kg. In embodiments, the population of cells comprising the modified HSPCs returned to the mammal comprises at least 1 million cells (e.g., at least 1 million CD34+ cells) per kg. In embodiments, the population of cells comprising the modified HSPCs returned to the mammal comprises at least 2 million cells (e.g., at least 2 million CD34+ cells) per kg. In embodiments, the population of cells comprising the modified HSPCs returned to the mammal comprises at least 3 million cells (e.g., at least 3 million CD34+ cells) per kg. In embodiments, the population of cells comprising the modified HSPCs returned to the mammal comprises at least 4 million cells (e.g., at least 4 million CD34+ cells) per kg. In embodiments, the population of cells comprising the modified HSPCs returned to the mammal comprises at least 5 million cells (e.g., at least 5 million CD34+ cells) per kg. In embodiments, the population of cells comprising the modified HSPCs returned to the mammal comprises at least 6 million cells (e.g., at least 6 million CD34+ cells) per kg. In embodiments, the population of cells comprising the modified HSPCs returned to the mammal comprises about 1 million cells (e.g., about 1 million CD34+ cells) per kg. In embodiments, the population of cells comprising the modified HSPCs returned to the mammal comprises about 2 million cells (e.g., about 2 million CD34+ cells) per kg. In embodiments, the population of cells comprising the modified HSPCs returned to the mammal comprises about 3 million cells (e.g., about 3 million CD34+ cells) per kg. In embodiments, the population of cells comprising the modified HSPCs returned to the mammal comprises about 4 million cells (e.g., about 4 million CD34+ cells) per kg. In embodiments, the population of cells comprising the modified HSPCs returned to the mammal comprises about 5 million cells (e.g., about 5 million CD34+ cells) per kg. In embodiments, the population of cells comprising the modified HSPCs returned to the mammal comprises about 6 million cells (e.g., about 6 million CD34+ cells) per kg. In embodiments, the population of cells comprising the modified HSPCs returned to the mammal comprises about 2×10⁶ cells per kg body weight of the patient. In embodiments, the population of cells comprising the modified HSPCs returned to the mammal comprises at least 2×10⁶ cells per kg body weight of the patient.

[0733] In embodiments, any of the methods described above results in the patient having at least 80% of its circulating CD34+ cells comprising an indel at or near the genomic site complementary to the targeting domain of the gRNA molecule used in the method, e.g., as measured at least 15 days, e.g., at least 20, at least 30, at least 40 at least 50 or at least 60 days after reintroduction of the cells into the mammal.

[0734] In embodiments, any of the methods described above results in the patient having at least 20% of its bone marrow CD34+ cells comprising an indel at or near the genomic site complementary to the targeting domain of the gRNA molecule used in the method, e.g., as measured at least 15 days, e.g., at least 20, at least 30, at least 40 at least 50 or at least 60 days after reintroduction of the cells into the mammal.

[0735] In embodiments, the HSPCs that are reintroduced into the mammal are able to differentiate in vivo into cells of the erythroid lineage, e.g., red blood cells, and said differentiated cells exhibit increased fetal hemoglobin levels, e.g., produce at least 6 picograms fetal hemoglobin per cell, e.g., at least 7 picograms fetal hemoglobin per cell, at least 8 picograms fetal hemoglobin per cell, at least 9 picograms fetal hemoglobin per cell, at least 10 picograms fetal hemoglobin per cell, e.g., between about 9 and about 10 picograms fetal hemoglobin per cell, e.g., such that the hemoglobinopathy is treated the mammal.

[0736] It will be understood that when a cell is characterized as having increased fetal hemoglobin, that includes embodiments in which a progeny, e.g., a differentiated progeny, of that cell exhibits increased fetal hemoglobin. For example, in the methods described herein, the altered or modified CD34+ cell (or cell population) may not express increased fetal hemoglobin, but when differentiated into cells of erythroid lineage, e.g., red blood cells, the cells express increased fetal hemoglobin, e.g., increased fetal hemoglobin relative to an unmodified or unaltered cell under similar conditions.

[0737] XII. Culture Methods and Methods of Manufacturing Cells

[0738] The disclosure provides methods of culturing cells, e.g., HSPCs, e.g., hematopoietic stem cells, e.g., CD34+ cells modified, or to be modified, with the gRNA molecules described herein.

[0739] DNA Repair Pathway Inhibitors

[0740] Without being bound by theory, it is believed that the pattern of indels produced by a given gRNA molecule at a particular target sequence is a product of each of the active DNA repair mechanisms within the cell (e.g., non-homologous end joining, microhomology-mediated end joining, etc.). Without being bound by theory, it is believed that a particularly favorable indel may be selected for or enriched for by contacting the cells to be edited with an inhibitor of a DNA repair pathway that does not produce the desired indel. Thus, the gRNA molecules, CRISPR systems, methods and other aspects of the invention may be performed in combination with such inhibitors. Examples of such inhibitors include those described in, e.g., WO2014/130955, the contents of which are hereby incorporated by reference in their entirety. In embodiment, the inhibitor is a DNAPKc inhibitor, e.g., NU7441.

[0741] Stem Cell Expanders

[0742] In one aspect the invention relates to culturing the cells, e.g., HSPCs, e.g., CD34+ cells modified, or to be modified, with the gRNA molecules described herein, with one or more agents that result in an increased expansion rate, increased expansion level, or increased engraftment relative to cells not treated with the agent. Such agents are referred to herein as stem cell expanders.

[0743] In an aspect, the one or more agents that result in an increased expansion rate or increased expansion level, relative to cells not treated with the agent, e.g., the stem cell expander, comprises an agent that is an inhibitor of the aryl hydrocarbon receptor (AHR) pathway. In aspects, the stem cell expander is a compound disclosed in WO2013/110198 or a compound disclosed in WO2010/059401, the contents of which are incorporated by reference in their entirety.

[0744] In one aspect, the one or more agents that result in an increased expansion rate or increased expansion level, relative to cells not treated with the agent, is a pyrimido[4,5-b]indole derivative, e.g., as disclosed in WO2013/110198, the contents of which are hereby incorporated by reference in their entirety. In one embodiment the agent is compound 1 ((1r,4r)-N′-(2-benzyl-7-(2-methyl-2H-tetrazol-5-yl)-9H-pyrimido[4,5-b]indol-4-yl)cyclohexane-1,4-diamine):

[chemical structure]

[0745] In another aspect, the agent is Compound 2 (methyl 4-(3-piperidin-1-ylpropylamino)-9H-pyrimido[4,5-b]indole-7-carboxylate):

[chemical structure]

[0746] In another aspect, the one or more agents that result in an increased expansion rate or increased expansion level, relative to cells not treated with the agent, is an agent disclosed in WO2010/059401, the contents of which are hereby incorporated by reference in their entirety.

[0747] In one embodiment, the stem cell expander is 4-(2-(2-(benzo[b]thiophen-3-yl)-9-isopropyl-9H-purin-6-ylamino)ethyl)phenol, i.e., is the compound from example 1 of WO2010/059401, having the following structure:

[chemical structure]

[0748] In another aspect, the stem cell expander is compound 4 ((S)-2-(6-(2-(1H-indol-3-yl)ethylamino)-2-(5-fluoropyridin-3-yl)-9H-purin-9-yl)propan-1-ol, i.e., is the compound 157S according to WO2010/059401), having the following structure:

[chemical structure]

[0749] In embodiments the population of HSPCs is contacted with the stem cell expander, e.g., compound 1, compound 2, compound 3, compound 4, or combinations thereof (e.g., a combination of compound 1 and compound 4) before introduction of the CRISPR system (e.g., gRNA molecule and/or Cas9 molecule of the invention) to said HSPCs. In embodiments, the population of HSPCs is contacted with the stem cell expander, e.g., compound 1, compound 2, compound 3, compound 4, or combinations thereof (e.g., a combination of compound 1 and compound 4), after introduction of the CRISPR system (e.g., gRNA molecule and/or Cas9 molecule of the invention) to said HSPCs. In embodiments, the population of HSPCs is contacted with the stem cell expander, e.g., compound 1, compound 2, compound 3, compound 4, or combinations thereof (e.g., a combination of compound 1 and compound 4), both before and after introduction of the CRISPR system (e.g., gRNA molecule and/or Cas9 molecule of the invention) to said HSPCs.

[0750] In embodiments, the stem cell expander is present in an effective amount to increase the expansion level of the HSPCs, relative to HSPCs in the same media but for the absence of the stem cell expander. In embodiments, the stem cell expander is present at a concentration ranging from about 0.01 to about 10 uM, e.g., from about 0.1 uM to about 1 uM. In embodiments, the stem cell expander is present in the cell culture medium at a concentration of about 1 uM, about 950 nM, about 900 nM, about 850 nM, about 800 nM, about 750 nM, about 700 nM, about 650 nM, about 600 nM, about 550 nM, about 500 nM, about 450 nM, about 400 nM, about 350 nM, about 300 nM, about 250 nM, about 200 nM, about 150 nM, about 100 nM, about 50 nM, about 25 nM, or about 10 nM. In embodiments, the stem cell expander is present at a concentration ranging from about 500 nM to about 750 nM.

[0751] In embodiments, the stem cell expander is compound 4, which is present in the cell culture medium at a concentration ranging from about 0.01 to about 10 micromolar (uM). In embodiments, the stem cell expander is compound 4, which is present in the cell culture medium at a concentration ranging from about 0.1 to about 1 micromolar (uM). In embodiments, the stem cell expander is compound 4, which is present in the cell culture medium at a concentration of about 0.75 micromolar (uM). In embodiments, the stem cell expander is compound 4, which is present in the cell culture medium at a concentration of about 0.5 micromolar (uM). In embodiments of any of the foregoing, the cell culture medium additionally comprises compound 1.

[0752] In embodiments, the stem cell expander is a mixture of compound 1 and compound 4.

[0753] In embodiments, the cells of the invention are contacted with one or more stem cell expander molecules for a sufficient time and in a sufficient amount to cause a 2 to 10,000-fold expansion of CD34+ cells, e.g., a 2-1000-fold expansion of CD34+ cells, e.g., a 2-100-fold expansion of CD34+ cells, e.g., a 20-200-fold expansion of CD34+ cells. As described herein, the contacting with the one or more stem cell expanders may be before the cells are contacted with a CRISPR system, e.g., as described herein, after the cells are contacted with a CRISPR system, e.g., as described herein, or a combination thereof. In an embodiment, the cells are contacted with one or more stem cell expander molecules, e.g., Compound 4, for a sufficient time and in a sufficient amount to cause at least a 2-fold expansion of CD34+ cells, e.g., CD34+ cells comprising an indel at or near the target site having complementarity to the targeting domain of the gRNA of the CRISPR/Cas9 system introduced into said cell. In an embodiment, the cells are contacted with one or more stem cell expander molecules, e.g., Compound 4, for a sufficient time and in a sufficient amount to cause at least a 4-fold expansion of CD34+ cells, e.g., CD34+ cells comprising an indel at or near the target site having complementarity to the targeting domain of the gRNA of the CRISPR/Cas9 system introduced into said cell. In an embodiment, the cells are contacted with one or more stem cell expander molecules, e.g., Compound 4, for a sufficient time and in a sufficient amount to cause at least a 5-fold expansion of CD34+ cells, e.g., CD34+ cells comprising an indel at or near the target site having complementarity to the targeting domain of the gRNA of the CRISPR/Cas9 system introduced into said cell. In an embodiment, the cells are contacted with one or more stem cell expander molecules for a sufficient time and in a sufficient amount to cause at least a 10-fold expansion of CD34+ cells. In an embodiment, the cells are contacted with one or more stem cell expander molecules for a sufficient time and in a sufficient amount to cause at least a 20-fold expansion of CD34+ cells. In an embodiment, the cells are contacted with one or more stem cell expander molecules for a sufficient time and in a sufficient amount to cause at least a 30-fold expansion of CD34+ cells. In an embodiment, the cells are contacted with one or more stem cell expander molecules for a sufficient time and in a sufficient amount to cause at least a 40-fold expansion of CD34+ cells. In an embodiment, the cells are contacted with one or more stem cell expander molecules for a sufficient time and in a sufficient amount to cause at least a 50-fold expansion of CD34+ cells. In an embodiment, the cells are contacted with one or more stem cell expander molecules for a sufficient time and in a sufficient amount to cause at least a 60-fold expansion of CD34+ cells. In embodiments, the cells are contacted with the one or more stem cell expanders for a period of about 1-60 days, e.g., about 1-50 days, e.g., about 1-40 days, e.g., about 1-30 days, e.g., 1-20 days, e.g., about 1-10 days, e.g., about 7 days, e.g., about 1-5 days, e.g., about 2-5 days, e.g., about 2-4 days, e.g., about 2 days or, e.g., about 4 days.

[0754] In embodiments, the cells, e.g., HSPCs, e.g., as described herein, are cultured ex vivo for a period of about 1 hour to about 10 days, e.g., a period of about 12 hours to about 5 days, e.g., a period of about 12 hours to 4 days, e.g., a period of about 1 day to about 4 days, e.g., a period of about 1 day to about 2 days, e.g., a period of about 1 day or a period of about 2 days, prior to the step of contacting the cells with a CRISPR system, e.g., described herein. In embodiments, said culturing prior to said contacting step is in a composition (e.g., a cell culture medium) comprising a stem cell expander, e.g., described herein, e.g., compound 4, e.g., compound 4 at a concentration of about 0.25 uM to about 1 uM, e.g., compound 4 at a concentration of about 0.75-0.5 micromolar. In embodiments, the cells are cultured ex vivo for a period of no more than about about 1 day, e.g., no more than about 18, 17, 16, 15, 14, 13, 12, 11, 10, 9, 8, 7, 6, 5, 4, 3, 2, or 1 hour(s) after the step of contacting the cells with a CRISPR system, e.g., described herein, e.g., in a cell culture medium which comprises a stem cell expander, e.g., described herein, e.g., compound 4, e.g., compound 4 at a concentration of about 0.25 uM to about 1 uM, e.g., compound 4 at a concentration of about 0.75-0.5 micromolar. In other embodiments, the cells are cultured ex vivo for a period of about 1 hour to about 14 days, e.g., a period of about 12 hours to about 10 days, e.g., a period of about 1 day to about 10 days, e.g., a period of about 1 day to about 5 days, e.g., a period of about 1 day to about 4 days, e.g., a period of about 2 days to about 4 days, e.g., a period of about 2 days, about 3 days or about 4 days, after the step of contacting the cells with a CRISPR system, e.g., described herein, in a cell culture medium, e.g., which comprises a stem cell expander, e.g., described herein, e.g., compound 4, e.g., compound 4 at a concentration of about 0.25 uM to about 1 uM, e.g., compound 4 at a concentration of about 0.75-0.5 micromolar.

[0755] In embodiments, the cell culture medium is a chemically defined medium. In embodiments, the cell culture medium may additionally contain, for example, StemSpan SFEM (StemCell Technologies; Cat no. 09650). In embodiments, the cell culture medium may alternatively or additionally contain, for example, HSC Brew, GMP (Miltenyi). In embodiments, the media may be supplemented with thrombopoietin (TPO), human Flt3 ligand (Flt-3L), human stem cell factor (SCF), human interleukin-6, L-glutamine, and/or penicillin/streptomycin. In embodiments, the media is supplemented with thrombopoietin (TPO), human Flt3 ligand (Flt-3L), human stem cell factor (SCF), human interleukin-6, and L-glutamine. In other embodiments, the media is supplemented with thrombopoietin (TPO), human Flt3 ligand (Flt-3L), human stem cell factor (SCF), and human interleukin-6. In other embodiments the media is supplemented with thrombopoietin (TPO), human Flt3 ligand (Flt-3L), and human stem cell factor (SCF), but not human interleukin-6. When present in the medium, the thrombopoietin (TPO), human Flt3 ligand (Flt-3L), human stem cell factor (SCF), human interleukin-6, and/or L-glutamine are each present in a concentration ranging from about 1 ng/mL to about 1000 ng/mL, e.g., a concentration ranging from about 10 ng/mL to about 500 ng/mL, e.g., a concentration ranging from about 10 ng/mL to about 100 ng/mL, e.g., a concentration ranging from about 25 ng/mL to about 75 ng/mL, e.g., a concentration of about 50 ng/mL. In embodiments, each of the supplemented components is at the same concentration. In other embodiments, each of the supplemented components is at a different concentration. In an embodiment, the medium comprises StemSpan SFEM (StemCell Technologies; Cat no. 09650), 50 ng/mL of thrombopoietin (Tpo), 50 ng/mL of human Flt3 ligand (Flt-3L), 50 ng/mL of human stem cell factor (SCF), and 50 ng/mL of human interleukin-6 (IL-6). In an embodiment, the medium comprises StemSpan SFEM (StemCell Technologies; Cat no. 09650), 50 ng/mL of thrombopoietin (Tpo), 50 ng/mL of human Flt3 ligand (Flt-3L), and 50 ng/mL of human stem cell factor (SCF), and does not comprise IL-6. In embodiments, the media further comprises a stem cell expander, e.g., compound 4, e.g., compound 4 at a concentration of 0.75 μM. In embodiments, the media further comprises a stem cell expander, e.g., compound 4, e.g., compound 4 at a concentration of 0.5 μM. In embodiments, the media further comprises 1% L-glutamine and 2% penicillin/streptomycin. In embodiments, the cell culture medium is serum free.

[0756] XII. Combination Therapy

[0757] The present disclosure contemplates the use of the gRNA molecules described herein, or cells (e.g., hematopoietic stem cells, e.g., CD34+ cells) modified with the gRNA molecules described herein, in combination with one or more other therapeutic modalities and/or agents agents. Thus, in addition to the use of the gRNA molecules or cells modified with the gRNA molecules described herein, one may also administer to the subject one or more “standard” therapies for treating hemoglobinopathies.

[0758] The one or more additional therapies for treating hemoglobinopathies may include, for example, additional stem cell transplantation, e.g., hematopoietic stem cell transplantation. The stem cell transplantation may be allogeneic or autologous.

[0759] The one or more additional therapies for treating hemoglobinopathies may include, for example, blood transfusion and/or iron chelation (e.g., removal) therapy. Known iron chelation agents include, for example, deferoxamine and deferasirox.

[0760] The one or more additional therapies for treating hemoglobinopathies may include, for example, folic acid supplements, or hydroxyurea (e.g., 5-hydroxyurea). The one or more additional therapies for treating hemoglobinopathies may be hydroxyurea. In embodiments, the hydroxyurea may be administered at a dose of, for example, 10-35 mg/kg per day, e.g., 10-20 mg/kg per day. In embodiments, the hydroxyurea is adminstered at a dose of 10 mg/kg per day. In embodiments, the hydroxyurea is adminstered at a dose of 10 mg/kg per day. In embodiments, the hydroxyurea is adminstered at a dose of 20 mg/kg per day. In embodiments, the hydroxyurea is administered before and/or after the cell (or population of cells), e.g., CD34+ cell (or population of cells) of the invention, e.g., as described herein.

[0761] The one or more additional therapeutic agents may include, for example, an anti-p-selectin antibody, e.g., SelG1 (Selexys). P-selectin antibodies are described in, for example, PCT publication WO1993/021956, PCT publication WO1995/034324, PCT publication WO2005/100402, PCT publication WO2008/069999, US patent application publication US2011/0293617, U.S. Pat. Nos. 5,800,815, 6,667,036, 8,945,565, 8,377,440 and 9,068,001, the contents of each of which are incorporated herein in their entirety.

[0762] The one or more additional agents may include, for example, a small molecule which upregulates fetal hemoglobin. Examples of such molecules include TN1 (e.g., as described in Nam, T. et al., ChemMedChem 2011, 6, 777-780, DOI: 10.1002/cmdc.201000505, herein incorporated by reference).

[0763] The one or more additional therapies may also include irradiation or other bone marrow ablation therapies known in the art. An example of such a therapy is busulfan. Such additional therapy may be performed prior to introduction of the cells of the invention into the subject. In an embodiment the methods of treatment described herein (e.g., the methods of treatment that include administration of cells (e.g., HSPCs) modified by the methods described herein (e.g., modified with a CRISPR system described herein, e.g., to increase HbF production)), the method does not include the step of bone marrow ablation. In embodiments, the methods include a partial bone marrow ablation step.

[0764] The therapies described herein (e.g., comprising administering a population of HSPCs, e.g., HSPCs modified using a CRISPR system described herein) may also be combined with an additional therapeutic agent. In an embodiment, the additional therapeutic agent is an HDAC inhibitor, e.g., panobinostat. In an embodiment, the additional therapeutic is a compound described in PCT Publication No.

[0765] WO2014/150256, e.g., a compound described in Table 1 of WO2014/150256, e.g., GBT440. Other examples of HDAC inhibitors include, for example, suberoylanilide hydroxamic acid (SAHA). The one or more additional agents may include, for example, a DNA methylation inhibitor. Such agents have been shown to increase the HbF induction in cells having reduced BCL11a activity (e.g., Jian Xu et al, Science 334, 993 (2011); DOI: 0.1126/science.1211053, herein incorporated by reference). Other HDAC inhibitors include any HDAC inhibitor known in the art, for example, trichostatin A, HC toxin, DACI-2, FK228, DACI-14, depudicin, DACI-16, tubacin, NK57, MAZ1536, NK125, Scriptaid, Pyroxamide, MS-275, ITF-2357, MCG-D0103, CRA-024781, CI-994, and LBH589 (see, e.g., Bradner J E, et al., PNAS, 2010 (vol. 107:28), 12617-12622, herein incorporated by reference in its entirety).

[0766] The gRNA molecules described herein, or cells (e.g., hematopoietic stem cells, e.g., CD34+ cells) modified with the gRNA molecules described herein, and the co-therapeutic agent or co-therapy can be administered in the same formulation or separately. In the case of separate administration, the gRNA molecules described herein, or cells modified with the gRNA molecules described herein, can be administered before, after or concurrently with the co-therapeutic or co-therapy. One agent may precede or follow administration of the other agent by intervals ranging from minutes to weeks. In embodiments where two or more different kinds of therapeutic agents are applied separately to a subject, one would generally ensure that a significant period of time did not expire between the time of each delivery, such that these different kinds of agents would still be able to exert an advantageously combined effect on the target tissues or cells.

[0767] XIII. Modified Nucleosides, Nucleotides, and Nucleic Acids

[0768] Modified nucleosides and modified nucleotides can be present in nucleic acids, e.g., particularly gRNA, but also other forms of RNA, e.g., mRNA, RNAi, or siRNA. As described herein “nucleoside” is defined as a compound containing a five-carbon sugar molecule (a pentose or ribose) or derivative thereof, and an organic base, purine or pyrimidine, or a derivative thereof. As described herein, “nucleotide” is defined as a nucleoside further comprising a phosphate group.

[0769] Modified nucleosides and nucleotides can include one or more of:
[0770] (i) alteration, e.g., replacement, of one or both of the non-linking phosphate oxygens and/or of one or more of the linking phosphate oxygens in the phosphodiester backbone linkage;
[0771] (ii) alteration, e.g., replacement, of a constituent of the ribose sugar, e.g., of the 2′ hydroxyl on the ribose sugar;
[0772] (iii) wholesale replacement of the phosphate moiety with “dephospho” linkers;
[0773] (iv) modification or replacement of a naturally occurring nucleobase, including with a non-canonical nucleobase;
[0774] (v) replacement or modification of the ribose-phosphate backbone;
[0775] (vi) modification of the 3′ end or 5′ end of the oligonucleotide, e.g., removal, modification or replacement of a terminal phosphate group or conjugation of a moiety, cap or linker; and
[0776] (vii) modification or replacement of the sugar.

[0777] The modifications listed above can be combined to provide modified nucleosides and nucleotides that can have two, three, four, or more modifications. For example, a modified nucleoside or nucleotide can have a modified sugar and a modified nucleobase. In an embodiment, every base of a gRNA is modified, e.g., all bases have a modified phosphate group, e.g., all are phosphorothioate groups. In an embodiment, all, or substantially all, of the phosphate groups of a unimolecular or modular gRNA molecule are replaced with phosphorothioate groups. In embodiments, one or more of the five 3′-terminal bases and/or one or more of the figure 5′-terminal bases of the gRNA are modified with a phosphorothioate group.

[0778] In an embodiment, modified nucleotides, e.g., nucleotides having modifications as described herein, can be incorporated into a nucleic acid, e.g., a “modified nucleic acid.” In some embodiments, the modified nucleic acids comprise one, two, three or more modified nucleotides. In some embodiments, at least 5% (e.g., at least about 5%, at least about 10%, at least about 15%, at least about 20%, at least about 25%, at least about 30%, at least about 35%, at least about 40%, at least about 45%, at least about 50%, at least about 55%, at least about 60%, at least about 65%, at least about 70%, at least about 75%, at least about 80%, at least about 85%, at least about 90%, at least about 95%, or about 100%) of the positions in a modified nucleic acid are a modified nucleotides.

[0779] Unmodified nucleic acids can be prone to degradation by, e.g., cellular nucleases. For example, nucleases can hydrolyze nucleic acid phosphodiester bonds. Accordingly, in one aspect the modified nucleic acids described herein can contain one or more modified nucleosides or nucleotides, e.g., to introduce stability toward nucleases.

[0780] In some embodiments, the modified nucleosides, modified nucleotides, and modified nucleic acids described herein can exhibit a reduced innate immune response when introduced into a population of cells, both in vivo and ex vivo. The term “innate immune response” includes a cellular response to exogenous nucleic acids, including single stranded nucleic acids, generally of viral or bacterial origin, which involves the induction of cytokine expression and release, particularly the interferons, and cell death. In some embodiments, the modified nucleosides, modified nucleotides, and modified nucleic acids described herein can disrupt binding of a major groove interacting partner with the nucleic acid. In some embodiments, the modified nucleosides, modified nucleotides, and modified nucleic acids described herein can exhibit a reduced innate immune response when introduced into a population of cells, both in vivo and ex vivo, and also disrupt binding of a major groove interacting partner with the nucleic acid.

### Definitions of Chemical Groups

[0781] As used herein, “alkyl” is meant to refer to a saturated hydrocarbon group which is straight-chained or branched. Example alkyl groups include methyl (Me), ethyl (Et), propyl (e.g., n-propyl and isopropyl), butyl (e.g., n-butyl, isobutyl, t-butyl), pentyl (e.g., n-pentyl, isopentyl, neopentyl), and the like. An alkyl group can contain from 1 to about 20, from 2 to about 20, from 1 to about 12, from 1 to about 8, from 1 to about 6, from 1 to about 4, or from 1 to about 3 carbon atoms.

[0782] As used herein, “aryl” refers to monocyclic or polycyclic (e.g., having 2, 3 or 4 fused rings) aromatic hydrocarbons such as, for example, phenyl, naphthyl, anthracenyl, phenanthrenyl, indanyl, indenyl, and the like. In some embodiments, aryl groups have from 6 to about 20 carbon atoms.

[0783] As used herein, “alkenyl” refers to an aliphatic group containing at least one double bond. As used herein, “alkynyl” refers to a straight or branched hydrocarbon chain containing 2-12 carbon atoms and characterized in having one or more triple bonds. Examples of alkynyl groups include, but are not limited to, ethynyl, propargyl, and 3-hexynyl.

[0784] As used herein, “arylalkyl” or “aralkyl” refers to an alkyl moiety in which an alkyl hydrogen atom is replaced by an aryl group. Aralkyl includes groups in which more than one hydrogen atom has been replaced by an aryl group. Examples of “arylalkyl” or “aralkyl” include benzyl, 2-phenylethyl, 3-phenylpropyl, 9-fluorenyl, benzhydryl, and trityl groups.

[0785] As used herein, “cycloalkyl” refers to a cyclic, bicyclic, tricyclic, or polycyclic non-aromatic hydrocarbon groups having 3 to 12 carbons. Examples of cycloalkyl moieties include, but are not limited to, cyclopropyl, cyclopentyl, and cyclohexyl.

[0786] As used herein, “heterocyclyl” refers to a monovalent radical of a heterocyclic ring system. Representative heterocyclyls include, without limitation, tetrahydrofuranyl, tetrahydrothienyl, pyrrolidinyl, pyrrolidonyl, piperidinyl, pyrrolinyl, piperazinyl, dioxanyl, dioxolanyl, diazepinyl, oxazepinyl, thiazepinyl, and morpholinyl.

[0787] As used herein, “heteroaryl” refers to a monovalent radical of a heteroaromatic ring system. Examples of heteroaryl moieties include, but are not limited to, imidazolyl, oxazolyl, thiazolyl, triazolyl, pyrrolyl, furanyl, indolyl, thiophenyl pyrazolyl, pyridinyl, pyrazinyl, pyridazinyl, pyrimidinyl, indolizinyl, purinyl, naphthyridinyl, quinolyl, and pteridinyl.

[0788] Phosphate Backbone Modifications

[0789] The Phosphate Group

[0790] In some embodiments, the phosphate group of a modified nucleotide can be modified by replacing one or more of the oxygens with a different substituent. Further, the modified nucleotide, e.g., modified nucleotide present in a modified nucleic acid, can include the wholesale replacement of an unmodified phosphate moiety with a modified phosphate as described herein. In some embodiments, the modification of the phosphate backbone can include alterations that result in either an uncharged linker or a charged linker with unsymmetrical charge distribution.

[0791] Examples of modified phosphate groups include, phosphorothioate, phosphoroselenates, borano phosphates, borano phosphate esters, hydrogen phosphonates, phosphoroamidates, alkyl or aryl phosphonates and phosphotriesters. In some embodiments, one of the non-bridging phosphate oxygen atoms in the phosphate backbone moiety can be replaced by any of the following groups: sulfur (S), selenium (Se), BR₃ (wherein R can be, e.g., hydrogen, alkyl, or aryl), C (e.g., an alkyl group, an aryl group, and the like), H, NR₂ (wherein R can be, e.g., hydrogen, alkyl, or aryl), or OR (wherein R can be, e.g., alkyl or aryl). The phosphorous atom in an unmodified phosphate group is achiral. However, replacement of one of the non-bridging oxygens with one of the above atoms or groups of atoms can render the phosphorous atom chiral; that is to say that a phosphorous atom in a phosphate group modified in this way is a stereogenic center. The stereogenic phosphorous atom can possess either the “R” configuration (herein Rp) or the “S” configuration (herein Sp).

[0792] Phosphorodithioates have both non-bridging oxygens replaced by sulfur. The phosphorus center in the phosphorodithioates is achiral which precludes the formation of oligoribonucleotide diastereomers. In some embodiments, modifications to one or both non-bridging oxygens can also include the replacement of the non-bridging oxygens with a group independently selected from S, Se, B, C, H, N, and OR (R can be, e.g., alkyl or aryl).

[0793] The phosphate linker can also be modified by replacement of a bridging oxygen, (i.e., the oxygen that links the phosphate to the nucleoside), with nitrogen (bridged phosphoroamidates), sulfur (bridged phosphorothioates) and carbon (bridged methylenephosphonates). The replacement can occur at either linking oxygen or at both of the linking oxygens.

[0794] Replacement of the Phosphate Group

[0795] The phosphate group can be replaced by non-phosphorus containing connectors. In some embodiments, the charge phosphate group can be replaced by a neutral moiety.

[0796] Examples of moieties which can replace the phosphate group can include, without limitation, e.g., methyl phosphonate, hydroxylamino, siloxane, carbonate, carboxymethyl, carbamate, amide, thioether, ethylene oxide linker, sulfonate, sulfonamide, thioformacetal, formacetal, oxime, methyleneimino, methylenemethylimino, methylenehydrazo, methylenedimethylhydrazo and methyleneoxymethylimino.

[0797] Replacement of the Ribophosphate Backbone

[0798] Scaffolds that can mimic nucleic acids can also be constructed wherein the phosphate linker and ribose sugar are replaced by nuclease resistant nucleoside or nucleotide surrogates. In some embodiments, the nucleobases can be tethered by a surrogate backbone. Examples can include, without limitation, the morpholino, cyclobutyl, pyrrolidine and peptide nucleic acid (PNA) nucleoside surrogates.

[0799] Sugar Modifications

[0800] The modified nucleosides and modified nucleotides can include one or more modifications to the sugar group. For example, the 2′ hydroxyl group (OH) can be modified or replaced with a number of different “oxy” or “deoxy” substituents. In some embodiments, modifications to the 2′ hydroxyl group can enhance the stability of the nucleic acid since the hydroxyl can no longer be deprotonated to form a 2′-alkoxide ion. The 2′-alkoxide can catalyze degradation by intramolecular nucleophilic attack on the linker phosphorus atom.

[0801] Examples of “oxy”-2′ hydroxyl group modifications can include alkoxy or aryloxy (OR, wherein “R” can be, e.g., alkyl, cycloalkyl, aryl, aralkyl, heteroaryl or a sugar); polyethyleneglycols (PEG), O(CH₂CH₂O)ₙCH2CH₂OR wherein R can be, e.g., H or optionally substituted alkyl, and n can be an integer from 0 to 20 (e.g., from 0 to 4, from 0 to 8, from 0 to 10, from 0 to 16, from 1 to 4, from 1 to 8, from 1 to 10, from 1 to 16, from 1 to 20, from 2 to 4, from 2 to 8, from 2 to 10, from 2 to 16, from 2 to 20, from 4 to 8, from 4 to 10, from 4 to 16, and from 4 to 20). In some embodiments, the “oxy”-2′ hydroxyl group modification can include “locked” nucleic acids (LNA) in which the 2′ hydroxyl can be connected, e.g., by a Ci-₆ alkylene or Cj-6 heteroalkylene bridge, to the 4′ carbon of the same ribose sugar, where exemplary bridges can include methylene, propylene, ether, or amino bridges; O-amino (wherein amino can be, e.g., NH₂; alkylamino, dialkylamino, heterocyclyl, arylamino, diarylamino, heteroarylamino, or diheteroarylamino, ethylenediamine, or polyamino) and aminoalkoxy, O(CH₂)ₙ-amino, (wherein amino can be, e.g., NH₂; alkylamino, dialkylamino, heterocyclyl, arylamino, diarylamino, heteroarylamino, or diheteroarylamino, ethylenediamine, or polyamino). In some embodiments, the “oxy”-2′ hydroxyl group modification can include the methoxyethyl group (MOE), (OCH₂CH₂OCH₃, e.g., a PEG derivative).

[0802] “Deoxy” modifications can include hydrogen (i.e. deoxyribose sugars, e.g., at the overhang portions of partially ds RNA); halo (e.g., bromo, chloro, fluoro, or iodo); amino (wherein amino can be, e.g., NH₂; alkylamino, dialkylamino, heterocyclyl, arylamino, diarylamino, heteroarylamino, diheteroarylamino, or amino acid); NH(CH₂CH₂NH)ₙCH2CH₂— amino (wherein amino can be, e.g., as described herein), —NHC(O)R (wherein R can be, e.g., alkyl, cycloalkyl, aryl, aralkyl, heteroaryl or sugar), cyano; mercapto; alkyl-thio-alkyl; thioalkoxy; and alkyl, cycloalkyl, aryl, alkenyl and alkynyl, which may be optionally substituted with e.g., an amino as described herein.

[0803] The sugar group can also contain one or more carbons that possess the opposite stereochemical configuration than that of the corresponding carbon in ribose. Thus, a modified nucleic acid can include nucleotides containing e.g., arabinose, as the sugar. The nucleotide “monomer” can have an alpha linkage at the Γ position on the sugar, e.g., alpha-nucleosides. The modified nucleic acids can also include “abasic” sugars, which lack a nucleobase at C-. These abasic sugars can also be further modified at one or more of the constituent sugar atoms. The modified nucleic acids can also include one or more sugars that are in the L form, e.g. L-nucleosides.

[0804] Generally, RNA includes the sugar group ribose, which is a 5-membered ring having an oxygen. Exemplary modified nucleosides and modified nucleotides can include, without limitation, replacement of the oxygen in ribose (e.g., with sulfur (S), selenium (Se), or alkylene, such as, e.g., methylene or ethylene); addition of a double bond (e.g., to replace ribose with cyclopentenyl or cyclohexenyl); ring contraction of ribose (e.g., to form a 4-membered ring of cyclobutane or oxetane); ring expansion of ribose (e.g., to form a 6- or 7-membered ring having an additional carbon or heteroatom, such as for example, anhydrohexitol, altritol, mannitol, cyclohexanyl, cyclohexenyl, and morpholino that also has a phosphoramidate backbone). In some embodiments, the modified nucleotides can include multicyclic forms (e.g., tricyclo; and “unlocked” forms, such as glycol nucleic acid (GNA) (e.g., R-GNA or S-GNA, where ribose is replaced by glycol units attached to phosphodiester bonds), threose nucleic acid (TNA, where ribose is replaced with a-L-threofuranosyl-(3′-→2′)).

[0805] Modifications on the Nucleobase

[0806] The modified nucleosides and modified nucleotides described herein, which can be incorporated into a modified nucleic acid, can include a modified nucleobase. Examples of nucleobases include, but are not limited to, adenine (A), guanine (G), cytosine (C), and uracil (U). These nucleobases can be modified or wholly replaced to provide modified nucleosides and modified nucleotides that can be incorporated into modified nucleic acids. The nucleobase of the nucleotide can be independently selected from a purine, a pyrimidine, a purine or pyrimidine analog. In some embodiments, the nucleobase can include, for example, naturally-occurring and synthetic derivatives of a base.

[0807] Uracil

[0808] In some embodiments, the modified nucleobase is a modified uracil. Exemplary nucleobases and nucleosides having a modified uracil include without limitation pseudouridine (V), pyridin-4-one ribonucleoside, 5-aza-uridine, 6-aza-uridine, 2-thio-5-aza-uridine, 2-thio-uridine (s2U), 4-thio-uridine (s4U), 4-thio-pseudouridine, 2-thio-pseudouridine, 5-hydroxy-uridine (ho⁵U), 5-aminoallyl-uridine, 5-halo-uridine (e.g., 5-iodo-uridine or 5-bromo-uridine), 3-methyl-uridine (m³U), 5-methoxy-uridine (mo⁵U), uridine 5-oxyacetic acid (cmo⁵U), uridine 5-oxyacetic acid methyl ester (mcmo\hat{ }U), 5-carboxymethyl-uridine (cm^{s}U), 1-carboxymethyl-pseudouridine, 5-carboxyhydroxymethyl-uridine (chm⁵U), 5-carboxyhydroxymethyl-uridine methyl ester (mchm⁵U), 5-methoxycarbonylmethyl-uridine (mcm⁵U), 5-methoxycarbonylmethyl-2-thio-uridine (mcm⁵s2U), 5-aminomethyl-2-thio-uridine (nm⁵s2U), 5-methylaminomethyl-uridine (mnm⁵U), 5-methylaminomethyl-2-thio-uridine (mnm⁵s2U), 5-methylaminomethyl-2-seleno-uridine (mnm⁵se²U), 5-carbamoylmethyl-uridine (ncm⁵U), 5-carboxymethylaminomethyl-uridine (cmnm⁵U), 5-carboxymethylaminomethyl-2-thio-uridine (cmnm \s2U), 5-propynyl-uridine, 1-propynyl-pseudouridine, 5-taurinomethyl-uridine (xcm⁵U), 1-taurinomethyl-pseudouridine, 5-taurinomethyl-2-thio-uridine(Trn⁵s2U), 1-taurinomethyl-4-thio-pseudouridine, 5-methyl-uridine (m⁵U, i.e., having the nucleobase deoxythymine), 1-methyl-pseudouridine (ιτι′ψ). 5-methyl-2-thio-uridine (m⁵s2U), 1-methyl-4-thio-pseudouridine (m′sψ), 4-thio-1-methyl-pseudouridine, 3-methyl-pseudouridine (m′V), 2-thio-1-methyl-pseudouridine, 1-methyl-1-deaza-pseudouridine, 2-thio-1-methyl-1-deaza-pseudouridine, dihydroundine (D), dihydropseudoundine, 5,6-dihydrouridine, 5-methyl-dihydrouridine (m⁵D), 2-thio-dihydrouridine, 2-thio-dihydropseudouridine, 2-methoxy-uridine, 2-methoxy-4-thio-uridine, 4-methoxy-pseudouridine, 4-methoxy-2-thio-pseudouridine, N1-methyl-pseudouridine, 3-(3-amino-3-carboxypropyl)uridine (acp³U), 1-methyl-3-(3-amino-3-carboxypropy pseudouridine 5-(isopentenylaminomethyl)uridine (inm⁵U), 5-(isopentenylaminomethy])-2-thio-uridine (inm⁵s2U), a-thio-uridine, 2′-0-methyl-uridine (Urn), 5,2′-0-dimethyl-uridine (m⁵Um), 2′-0-methyl-pseudouridine (ψπι), 2-thio-2′-0-methyl-uridine (s2Um), 5-methoxycarbonylmethyl-2′-0-methyl-uridine (mcm⁵Um), 5-carbamoylmethyl-2′-0-methyl-uridine (ncm ⁵Um), 5-carboxymethylaminomethyl-2′-0-methyl-uridine (cmnm⁵Um), 3,2′-0-dimethyl-uridine (m³Um), 5-(isopentenylaminomethyl)-2′-0-methyl-uridine (inm ⁵Um), 1-thio-uridine, deoxythymidine, 2′-F-ara-uridine, 2′-F-uridine, 2′-OH-ara-uridine, 5-(2-carbomethoxyvinyl) uridine, 5-[3-(1-E-propenylamino)uridine, pyrazolo[3,4-d]pyrimidines, xanthine, and hypoxanthine.

[0809] Cytosine

[0810] In some embodiments, the modified nucleobase is a modified cytosine. Exemplary nucleobases and nucleosides having a modified cytosine include without limitation 5-aza-cytidine, 6-aza-cytidine, pseudoisocytidine, 3-methyl-cytidine (m³C), N4-acetyl-cytidine (act), 5-formyl-cytidine (f⁵C), N4-methyl-cytidine (m⁴C), 5-methyl-cytidine (m⁵C), 5-halo-cytidine (e.g., 5-iodo-cytidine), 5-hydroxymethyl-cytidine (hm⁵C), 1-methyl-pseudoisocytidine, pyrrolo-cytidine, pyrrolo-pseudoisocytidine, 2-thio-cytidine (s2C), 2-thio-5-methyl-cytidine, 4-thio-pseudoisocytidine, 4-thio-1-methyl-pseudoisocytidine, 4-thio-1-methyl-1-deaza-pseudoisocytidine, 1-methyl-1-deaza-pseudoisocytidine, zebularine, 5-aza-zebularine, 5-methyl-zebularine, 5-aza-2-thio-zebularine, 2-thio-zebularine, 2-methoxy-cytidine, 2-methoxy-5-methyl-cytidine, 4-methoxy-pseudoisocytidine, 4-methoxy-1-methyl-pseudoisocytidine, lysidine (k²C), a-thio-cytidine, 2′-0-methyl-cytidine (Cm), 5,2′-0-dimethyl-cytidine (m⁵Cm), N4-acetyl-2′-0-methyl-cytidine (ac⁴Cm), N4,2′-0-dimethyl-cytidine (m⁴Cm), 5-formyl-2′-0-methyl-cytidine (f ⁵Cm), N4,N4,2′-0-trimethyl-cytidine (m⁴²Cm), 1-thio-cytidine, 2′-F-ara-cytidine, 2′-F-cytidine, and 2′-OH-ara-cytidine.

[0811] Adenine

[0812] In some embodiments, the modified nucleobase is a modified adenine. Exemplary nucleobases and nucleosides having a modified adenine include without limitation 2-amino-purine, 2,6-diaminopurine, 2-amino-6-halo-purine (e.g., 2-amino-6-chloro-purine), 6-halo-purine (e.g., 6-chloi-purine), 2-amino-6-methyl-purine, 8-azido-adenosine, 7-deaza-adenine, 7-deaza-8-aza-adenine, 7-deaza-2-amino-purine, 7-deaza-8-aza-2-amino-purine, 7-deaza-2,6-diaminopurine, 7-deaza-8-aza-2,6-diaminopurine, 1-methyl-adenosine (m′A), 2-methyl-adenine (m A), N6-methyl-adenosine (m⁶A), 2-methylthio-N6-methyl-adenosine (ms2m⁶A), N6-isopentenyl-adenosine (i⁶A), 2-methylthio-N6-isopentenyl-adenosine (ms²i⁶A), N6-(cis-hydroxyisopentenyl)adenos′ine (io⁶A), 2-methylthio-N6-(cis-hydroxyisopentenyl)adenosine (ms2io⁶A), N6-glycinylcarbamoyl-adenosine (g⁶A), N6-threonylcarbamoyl-adenosine (t⁶A), N6-methyl-N6-threonylcarbamoyl-adenosine (m⁶t⁶A), 2-methylthio-N6-threonylcarbamoyl-adenosine (ms²g6A), N6,N6-dimethyl-adenosine (m⁶²A), N6-hydroxynorvalylcarbamoyl-adenosine (hn⁶A), 2-methylthio-N6-hydroxynorvalylcarbamoyl-adenosine (ms2hn⁶A), N6-acetyl-adenosine (ac⁶A), 7-methyl-adenine, 2-methylthio-adenine, 2-methoxy-adenine, a-thio-adenosine, 2′-0-methyl-adenosine (Am), N⁶,2′-0-dimethyl-adenosine (m⁵Am), N⁶-Methyl-2′-deoxyadenosine, N6,N6,2′-0-trimethyl-adenosine (m⁶₂Am), 1,2′-0-dimethyl-adenosine (m′ Am), 2′-0-ribosyladenosine (phosphate) (Ar(p)), 2-amino-N6-methyl-purine, 1-thio-adenosine, 8-azido-adenosine, 2′-F-ara-adenosine, 2′-F-adenosine, 2′-OH-ara-adenosine, and N6-(19-amino-pentaoxanonadecyl)-adenosine.

[0813] Guanine

[0814] In some embodiments, the modified nucleobase is a modified guanine. Exemplary nucleobases and nucleosides having a modified guanine include without limitation inosine (I), 1-methyl-inosine (m ′l), wyosine (imG), methylwyosine (mimG), 4-demethyl-wyo″sine (imG-14), isowyosine (imG2), wybutosine (yW), peroxywybutosine (o₂yW), hydroxywybutosine (OHyW), undermodified hydroxywybutosine (OHyW*), 7-deaza-guanosine, queuosine (Q), epoxyqueuosine (oQ), galactosyl-queuosine (galQ), mannosyl-queuosine (manQ), 7-cyano-7-deaza-guanosine (preQo), 7-aminomethyl-7-deaza-guanosine (preQi), archaeosine (G⁺), 7-deaza-8-aza-guanosine, 6-thio-guanosine, 6-thio-7-deaza-guanosine, 6-thio-7-deaza-8-aza-guanosine, 7-methyl-guanosine (m⁷G), 6-thio-7-methyl-guanosine, 7-methyl-inosine, 6-methoxy-guanosine, 1-methyl-guanosine (m′G), N2-methyl-guanosine (m²G), N2,N2-dimethyl-guanosine (m²₂G), N2,7-dimethyl-guanosine (m²,7G), N2, N2,7-dimethyl-guanosine (m²,2,7G), 8-oxo-guanosine, 7-methyl-8-oxo-guanosine, 1-meth thio-guanosine, N2-methyl-6-thio-guanosine, N2,N2-dimethyl-6-thio-guanosine, a-thio-guanosine, 2′-0-methyl-guanosine (Gm), N2-methyl-2′-0-methyl-guanosine (m % m), N2,N2-dimethyl-2′-0-methyl-guanosine (m^{2 2}Gm), 1-methyl-2′-0-methyl-guanosine (m′Gm), N2,7-dimethyl-2′-0-methyl-guanosine (m²,7Gm), 2′-0-methyl-inosine (Im), 1,2′-0-dimethyl-inosine (m′lm), 0⁶-phenyl-2′-deoxyinosine, 2′-0-ribosylguanosine (phosphate) (Gr(p)), 1-thio-guanosine, 0⁶-methy]-guanosine, 0⁶-Methyl-2′-deoxyguanosine, 2′-F-ara-guanosine, and 2′-F-guanosine.

[0815] Modified gRNAs

[0816] In some embodiments, the modified nucleic acids can be modified gRNAs. In some embodiments, gRNAs can be modified at the 3′ end. In this embodiment, the gRNAs can be modified at the 3′ terminal U ribose. For example, the two terminal hydroxyl groups of the U ribose can be oxidized to aldehyde groups and a concomitant opening of the ribose ring to afford a modified nucleoside, wherein U can be an unmodified or modified uridine.

[0817] In another embodiment, the 3′ terminal U can be modified with a 2′ 3′ cyclic phosphate, wherein U can be an unmodified or modified uridine. In some embodiments, the gRNA molecules may contain 3′ nucleotides which can be stabilized against degradation, e.g., by incorporating one or more of the modified nucleotides described herein. In this embodiment, e.g., uridines can be replaced with modified uridines, e.g., 5-(2-amino)propyl uridine, and 5-bromo uridine, or with any of the modified uridines described herein; adenosines and guanosines can be replaced with modified adenosines and guanosines, e.g., with modifications at the 8-position, e.g., 8-bromo guanosine, or with any of the modified adenosines or guanosines described herein. In some embodiments, deaza nucleotides, e.g., 7-deaza-adenosine, can be incorporated into the gRNA. In some embodiments, O- and N-alkylated nucleotides, e.g., N6-methyl adenosine, can be incorporated into the gRNA. In some embodiments, sugar-modified ribonucleotides can be incorporated, e.g., wherein the 2′ OH— group is replaced by a group selected from H, —OR, —R (wherein R can be, e.g., methyl, alkyl, cycloalkyl, aryl, aralkyl, heteroaryl or sugar), halo, —SH, —SR (wherein R can be, e.g., alkyl, cycloalkyl, aryl, aralkyl, heteroaryl or sugar), amino (wherein amino can be, e.g., NH₂; alkylamino, dialkylamino, heterocyclyl, arylamino, diarylamino, heteroarylamino, diheteroarylamino, or amino acid); or cyano (—CN). In some embodiments, the phosphate backbone can be modified as described herein, e.g., with a phosphothioate group. In some embodiments, the nucleotides in the overhang region of the gRNA can each independently be a modified or unmodified nucleotide including, but not limited to 2′-sugar modified, such as, 2-F 2′-O-methyl, thymidine (T), 2′-O-methoxyethyl-5-methyluridine (Teo), 2′-O-methoxyethyladenosine (Aeo), 2′-O-methoxyethyl-5-methylcytidine (m5Ceo), and any combinations thereof.

[0818] In an embodiment, a one or more or all of the nucleotides in single stranded overhang of an RNA molecule, e.g., a gRNA molecule, are deoxynucleotides.

[0819] Pharmaceutical Compositions

[0820] Pharmaceutical compositions of the present invention may comprise a gRNA molecule described herein, e.g., a plurality of gRNA molecules as described herein, or a cell (e.g., a population of cells, e.g., a population of hematopoietic stem cells, e.g., of CD34+ cells) comprising one or more cells modified with one or more gRNA molecules described herein, in combination with one or more pharmaceutically or physiologically acceptable carriers, diluents or excipients. Such compositions may comprise buffers such as neutral buffered saline, phosphate buffered saline and the like; carbohydrates such as glucose, mannose, sucrose or dextrans, mannitol; proteins; polypeptides or amino acids such as glycine; antioxidants; chelating agents such as EDTA or glutathione; adjuvants (e.g., aluminum hydroxide); and preservatives. Compositions of the present invention are in one aspect formulated for intravenous administration.

[0821] Pharmaceutical compositions of the present invention may be administered in a manner appropriate to the disease to be treated (or prevented). The quantity and frequency of administration will be determined by such factors as the condition of the patient, and the type and severity of the patient's disease, although appropriate dosages may be determined by clinical trials.

[0822] In one embodiment, the pharmaceutical composition is substantially free of, e.g., there are no detectable levels of a contaminant, e.g., selected from the group consisting of endotoxin, mycoplasma, mouse antibodies, pooled human serum, bovine serum albumin, bovine serum, culture media components, unwanted CRISPR system components, a bacterium and a fungus. In one embodiment, the bacterium is at least one selected from the group consisting of Alcaligenes faecalis, Candida albicans, Escherichia coli, Haemophilus influenza, Neisseria meningitides, Pseudomonas aeruginosa, Staphylococcus aureus, Streptococcus pneumonia, and Streptococcus pyogenes group A.

[0823] The administration of the subject compositions may be carried out in any convenient manner, including by aerosol inhalation, injection, ingestion, transfusion, implantation or transplantation. The compositions described herein may be administered to a patient transarterially, subcutaneously, intradermally, intratumorally, intranodally, intramedullary, intramuscularly, by intravenous (i.v.) injection, or intraperitoneally. In one aspect, the compositions of the present invention are administered to a patient by intradermal or subcutaneous injection. In one aspect, the cell compositions of the present invention are administered by i.v. injection.

[0824] The dosage of the above treatments to be administered to a patient will vary with the precise nature of the condition being treated and the recipient of the treatment. The scaling of dosages for human administration can be performed according to art-accepted practices.

[0825] Cells

[0826] The invention also relates to cells comprising a gRNA molecule of the invention, or nucleic acid encoding said gRNA molecules.

[0827] In an aspect the cells are cells made by a process described herein.

[0828] In embodiments, the cells are hematopoietic stem cells (e.g., hematopoietic stem and progenitor cells; HSPCs), for example, CD34+ stem cells. In embodiments, the cells are CD34+/CD90+ stem cells. In embodiments, the cells are CD34+/CD90− stem cells. In embodiments, the cells are human hematopoietic stem cells. In embodiments, the cells are autologous. In embodiments, the cells are allogeneic.

[0829] In embodiments, the cells are derived from bone marrow, e.g., autologous bone marrow. In embodiments, the cells are derived from peripheral blood, e.g., mobilized peripheral blood, e.g., autologous mobilized peripheral blood. In embodiments employing mobilized peripheral blood, the cells are isolated from patients who have been administered a mobilization agent. In embodiments, the mobilization agent is G-CSF. In embodiments, the mobilization agent is Plerixafor® (AMD3100). In embodiments, the cells are derived from umbilical cord blood, e.g., allogeneic umbilical cord blood.

[0830] In embodiments, the cells are mammallian. In embodiments, the cells are human.

[0831] In an aspect, the invention provides a cell comprising a modification or alteration, e.g., an indel, at or near (e.g., within 20, 19, 18, 17, 16, 15, 14, 13, 12, 11, 10, 9, 8, 7, 6, 5, 4, 3, 2 or 1 nucleotides of) a nucleic acid sequence having complementarity to a gRNA molecule or gRNA molecules, e.g., as described herein, introduced into said cells, e.g., as part of a CRISPR system as described herein. In embodiments, the cell is a CD34+ cell. In embodiments, the altered or modified cell, e.g., CD34+ cell, maintains the ability to differentiate into cells of multiple lineages, e.g., maintains the ability to differentiate into cells of the erythroid lineage. In embodiments, the altered or modified cell, e.g., CD34+ cell, has undergone or is able to undergo at least 2, at least 3, at least 4, at least 5, at least 6, at least 7, at least 8, at least 9 or at least 10 or more doublings in culture, e.g., in culture comprising a stem cell expander, e.g., Compound 4. In embodiments, the altered or modified cell, e.g., CD34+ cell, has undergone or is able to undergo at least 5, e.g., about 5, doublings in culture, e.g., in culture comprising a stem cell expander molecule, e.g., as described herein, e.g., Compound 4. In embodiments the altered or modified cell, e.g., CD34+ cell, exhibits and/or is able to differentiate into a cell, e.g., into a cell of the erythroid lineage, e.g., into a red blood cell, that exhibits increased fetal hemoglobin level (e.g., expression level and/or protein level), e.g., at least a 20% increase in fetal hemoglobin protein level, relative to a similar unmodified or unaltered cell. In embodiments the altered or modified cell, e.g., CD34+ cell, exhibits and/or is able to differentiate into a cell, e.g., into a cell of the erythroid lineage, e.g., into a red blood cell, that exhibits increased fetal hemoglobin level (e.g., expression level and/or protein level), relative to a similar unmodified or unaltered cell, e.g., produces at least 6 picograms, e.g., at least 7 picograms, at least 8 picograms, at least 9 picograms, or at least 10 picograms of fetal hemoglobin. In embodiments the altered or modified cell, e.g., CD34+ cell, exhibits and/or is able to differentiate into a cell, e.g., into a cell of the erythroid lineage, e.g., into a red blood cell, that exhibits increased fetal hemoglobin level (e.g., expression level and/or protein level), relative to a similar unmodified or unaltered cell, e.g., produces about 6 to about 12, about about 6 to about 7, about 7 to about 8, about 8 to about 9, about 9 to about 10, about 10 to about 11 or about 11 to about 12 picograms of fetal hemoglobin.

[0832] In an aspect, the invention provides a population of cells comprising cells having a modification or alteration, e.g., an indel, at or near (e.g., within 20, 19, 18, 17, 16, 15, 14, 13, 12, 11, 10, 9, 8, 7, 6, 5, 4, 3, 2 or 1 nucleotides of) a nucleic acid sequence having complementarity to a gRNA molecule or gRNA molecules, e.g., as described herein, introduced into said cells, e.g., as part of a CRISPR system as described herein. In embodiments, at least 50%, e.g., at least 60%, at least 70%, at least 80% or at least 90% of the cells of the population have the modification or alteration (e.g., have at least one modification or alteration), e.g., as measured by NGS, e.g., as described herein, e.g., at day two following introduction of the gRNA and/or CRISPR system of the invention. In embodiments, at least 90%, e.g., at least 91%, at least 92%, at least 93%, at least 94%, at least 95%, at least 96%, at least 97%, at least 98% or at least 99% of the cells of the population have the modification or alteration (e.g., have at least one modification or alteration), e.g., as measured by NGS, e.g., as described herein, e.g., at day two following introduction of the gRNA and/or CRISPR system of the invention. In embodiments, the population of cells comprise CD34+ cells, e.g., comprise at least about 50%, at least about 60%, at least about 70%, at least about 80%, at least about 90%, at least about 95% or at least about 98% CD34+ cells. In embodiments, the population of cells comprising the altered or modified cells, e.g., CD34+ cells, maintain the ability to produce, e.g., differentiate into, cells of multiple lineages, e.g., maintains the ability to produce, e.g., differentiate into, cells of the erythroid lineage. In embodiments, the population of cells, e.g., population of CD34+ cells, has undergone or is able to undergo at least 2, at least 3, at least 4, at least 5, at least 6, at least 7, at least 8, at least 9 or at least 10 or more population doublings in culture, e.g., in culture comprising a stem cell expander, e.g., Compound 4. In embodiments, the population of altered or modified cells, e.g., population of CD34+ cells, has undergone or is capable of undergoing at least 5, e.g., about 5, population doublings in culture, e.g., in culture comprising a stem cell expander molecule, e.g., as described herein, e.g., Compound 4. In embodiments the population of cells comprising altered or modified cells, e.g., CD34+ cells, exhibits and/or is able to differentiate into a population of cells, e.g., into a population of cells of the erythroid lineage, e.g., into a population of red blood cells, that exhibits increased fetal hemoglobin level (e.g., expression level and/or protein level), e.g., at least a 20% increase in fetal hemoglobin protein level, relative to a similar unmodified or unaltered cells. In embodiments the population of cells comprising altered or modified cells, e.g., CD34+ cells, exhibits and/or is able to differentiate into a population of cells, e.g., into a population of cells of the erythroid lineage, e.g., into a population of red blood cells, that exhibits increased fetal hemoglobin level (e.g., expression level and/or protein level), relative to a similar unmodified or unaltered cells, e.g., comprises cells that produce at least 6 picograms, e.g., at least 7 picograms, at least 8 picograms, at least 9 picograms, or at least 10 picograms of fetal hemoglobin per cell. In embodiments the population of altered or modified cells, e.g., CD34+ cells, exhibits and/or is able to differentiate into a population of cells, e.g., into a population of cells of the erythroid lineage, e.g., into a population of red blood cells, that exhibits increased fetal hemoglobin level (e.g., expression level and/or protein level), relative to a similar unmodified or unaltered cell, e.g., comprises cells that produce about 6 to about 12, about about 6 to about 7, about 7 to about 8, about 8 to about 9, about 9 to about 10, about 10 to about 11 or about 11 to about 12 picograms of fetal hemoglobin per cell.

[0833] In embodiments, the population of cells, e.g., as described herein, comprises at least about 1e3 cells. In embodiments, the population of cells, e.g., as described herein, comprises at least about 1e4 cells. In embodiments, the population of cells, e.g., as described herein, comprises at least about 1e5 cells. In embodiments, the population of cells, e.g., as described herein, comprises at least about 1e6 cells. In embodiments, the population of cells, e.g., as described herein, comprises at least about 1e7 cells. In embodiments, the population of cells, e.g., as described herein, comprises at least about 1e8 cells. In embodiments, the population of cells, e.g., as described herein, comprises at least about 1e9 cells. In embodiments, the population of cells, e.g., as described herein, comprises at least about 1e10 cells. In embodiments, the population of cells, e.g., as described herein, comprises at least about 1e11 cells. In embodiments, the population of cells, e.g., as described herein, comprises at least about 1e12 cells. In embodiments, the population of cells, e.g., as described herein, comprises at least about 1e13 cells per kilogram body weight of the patient to which they are to be administered. In embodiments, the population of cells, e.g., as described herein, comprises at least about 1e6 cells per kilogram body weight of the patient to which they are to be administered. In embodiments, the population of cells, e.g., as described herein, comprises at least about 2e6 cells per kilogram body weight of the patient to which they are to be administered. In embodiments, the population of cells, e.g., as described herein, comprises at least about 3e6 cells per kilogram body weight of the patient to which they are to be administered. In embodiments, the population of cells, e.g., as described herein, comprises at least about 4e6 cells per kilogram body weight of the patient to which they are to be administered. In embodiments, the population of cells, e.g., as described herein, comprises at least about 5e6 cells per kilogram body weight of the patient to which they are to be administered. In embodiments, the population of cells, e.g., as described herein, comprises at least about 6e6 cells per kilogram body weight of the patient to which they are to be administered. In embodiments, the population of cells, e.g., as described herein, comprises at least about 7e6 cells per kilogram body weight of the patient to which they are to be administered. In embodiments, the population of cells, e.g., as described herein, comprises at least about 8e6 cells per kilogram body weight of the patient to which they are to be administered. In embodiments, the population of cells, e.g., as described herein, comprises at least about 9e6 cells per kilogram body weight of the patient to which they are to be administered. In embodiments, the population of cells, e.g., as described herein, comprises at least about 1e7 cells per kilogram body weight of the patient to which they are to be administered. In embodiments, the population of cells, e.g., as described herein, comprises at least about 2e7 cells per kilogram body weight of the patient to which they are to be administered. In embodiments, the population of cells, e.g., as described herein, comprises at least about 3e7 cells per kilogram body weight of the patient to which they are to be administered. In embodiments, the population of cells, e.g., as described herein, comprises at least about 4e7 cells per kilogram body weight of the patient to which they are to be administered. In embodiments, the population of cells, e.g., as described herein, comprises at least about 5e7 cells per kilogram body weight of the patient to which they are to be administered. In embodiments, the population of cells, e.g., as described herein, comprises at least about 6e7 cells per kilogram body weight of the patient to which they are to be administered. In embodiments, the population of cells, e.g., as described herein, comprises at least about 7e7 cells per kilogram body weight of the patient to which they are to be administered. In embodiments, the population of cells, e.g., as described herein, comprises at least about 8e7 cells per kilogram body weight of the patient to which they are to be administered. In embodiments, the population of cells, e.g., as described herein, comprises at least about 9e7 cells per kilogram body weight of the patient to which they are to be administered. In embodiments, the population of cells, e.g., as described herein, comprises at least about 1e8 cells per kilogram body weight of the patient to which they are to be administered. In any of the aforementioned embodiments, the population of cells may comprise at least about 50% (for example, at least about 60%, at least about 70%, at least about 80%, at least about 90%, at least about 95% or at least about 99%) HSPCs, e.g., CD34+ cells. In any of the aforementioned embodiments, the population of cells may comprise about 60% HSPCs, e.g., CD34+ cells. In an embodiment, the population of cells, e.g., as described herein, comprises about 3e7 cells and comprises about 2e7 HSPCs, e.g., CD34+ cells.

[0834] In embodiments, the population of cells, e.g., as described herein, comprises at least about 1e6 HSPCs, e.g., CD34+ cells, per kilogram body weight of the patient to which they are to be administered. In embodiments, the population of cells, e.g., as described herein, comprises at least about 1.5e6 HSPCs, e.g., CD34+ cells, per kilogram body weight of the patient to which they are to be administered. In embodiments, the population of cells, e.g., as described herein, comprises at least about 2e6 HSPCs, e.g., CD34+ cells, per kilogram body weight of the patient to which they are to be administered. In embodiments, the population of cells, e.g., as described herein, comprises at least about 3e6 HSPCs, e.g., CD34+ cells, per kilogram body weight of the patient to which they are to be administered. In embodiments, the population of cells, e.g., as described herein, comprises at least about 4e6 HSPCs, e.g., CD34+ cells, per kilogram body weight of the patient to which they are to be administered. In embodiments, the population of cells, e.g., as described herein, comprises at least about 5e6 HSPCs, e.g., CD34+ cells, per kilogram body weight of the patient to which they are to be administered. In embodiments, the population of cells, e.g., as described herein, comprises at least about 6e6 HSPCs, e.g., CD34+ cells, per kilogram body weight of the patient to which they are to be administered. In embodiments, the population of cells, e.g., as described herein, comprises at least about 7e6 HSPCs, e.g., CD34+ cells, per kilogram body weight of the patient to which they are to be administered. In embodiments, the population of cells, e.g., as described herein, comprises at least about 8e6 HSPCs, e.g., CD34+ cells, per kilogram body weight of the patient to which they are to be administered. In embodiments, the population of cells, e.g., as described herein, comprises at least about 9e6 HSPCs, e.g., CD34+ cells, per kilogram body weight of the patient to which they are to be administered. In embodiments, the population of cells, e.g., as described herein, comprises at least about 1e7 HSPCs, e.g., CD34+ cells, per kilogram body weight of the patient to which they are to be administered. In embodiments, the population of cells, e.g., as described herein, comprises at least about 2e7 HSPCs, e.g., CD34+ cells, per kilogram body weight of the patient to which they are to be administered. In embodiments, the population of cells, e.g., as described herein, comprises at least about 3e7 HSPCs, e.g., CD34+ cells, per kilogram body weight of the patient to which they are to be administered. In embodiments, the population of cells, e.g., as described herein, comprises at least about 4e7 HSPCs, e.g., CD34+ cells, per kilogram body weight of the patient to which they are to be administered. In embodiments, the population of cells, e.g., as described herein, comprises at least about 5e7 HSPCs, e.g., CD34+ cells, per kilogram body weight of the patient to which they are to be administered. In embodiments, the population of cells, e.g., as described herein, comprises at least about 6e7 HSPCs, e.g., CD34+ cells, per kilogram body weight of the patient to which they are to be administered. In embodiments, the population of cells, e.g., as described herein, comprises at least about 7e7 HSPCs, e.g., CD34+ cells, per kilogram body weight of the patient to which they are to be administered. In embodiments, the population of cells, e.g., as described herein, comprises at least about 8e7 HSPCs, e.g., CD34+ cells, per kilogram body weight of the patient to which they are to be administered. In embodiments, the population of cells, e.g., as described herein, comprises at least about 9e7 HSPCs, e.g., CD34+ cells, per kilogram body weight of the patient to which they are to be administered. In embodiments, the population of cells, e.g., as described herein, comprises at least about 1e8 HSPCs, e.g., CD34+ cells, per kilogram body weight of the patient to which they are to be administered. In embodiments, the population of cells, e.g., as described herein, comprises at least about 2e8 HSPCs, e.g., CD34+ cells, per kilogram body weight of the patient to which they are to be administered. In embodiments, the population of cells, e.g., as described herein, comprises at least about 3e8 HSPCs, e.g., CD34+ cells, per kilogram body weight of the patient to which they are to be administered. In embodiments, the population of cells, e.g., as described herein, comprises at least about 4e8 HSPCs, e.g., CD34+ cells, per kilogram body weight of the patient to which they are to be administered. In embodiments, the population of cells, e.g., as described herein, comprises at least about 5e8 HSPCs, e.g., CD34+ cells, per kilogram body weight of the patient to which they are to be administered.

[0835] In embodiments, the population of cells, e.g., as described herein, comprises about 1e6 HSPCs, e.g., CD34+ cells, per kilogram body weight of the patient to which they are to be administered. In embodiments, the population of cells, e.g., as described herein, comprises about 1.5e6 HSPCs, e.g., CD34+ cells, per kilogram body weight of the patient to which they are to be administered. In embodiments, the population of cells, e.g., as described herein, comprises about 2e6 HSPCs, e.g., CD34+cells, per kilogram body weight of the patient to which they are to be administered. In embodiments, the population of cells, e.g., as described herein, comprises about 3e6 HSPCs, e.g., CD34+ cells, per kilogram body weight of the patient to which they are to be administered. In embodiments, the population of cells, e.g., as described herein, comprises about 4e6 HSPCs, e.g., CD34+ cells, per kilogram body weight of the patient to which they are to be administered. In embodiments, the population of cells, e.g., as described herein, comprises about 5e6 HSPCs, e.g., CD34+ cells, per kilogram body weight of the patient to which they are to be administered. In embodiments, the population of cells, e.g., as described herein, comprises about 6e6 HSPCs, e.g., CD34+ cells, per kilogram body weight of the patient to which they are to be administered. In embodiments, the population of cells, e.g., as described herein, comprises about 7e6 HSPCs, e.g., CD34+ cells, per kilogram body weight of the patient to which they are to be administered. In embodiments, the population of cells, e.g., as described herein, comprises about 8e6 HSPCs, e.g., CD34+ cells, per kilogram body weight of the patient to which they are to be administered. In embodiments, the population of cells, e.g., as described herein, comprises about 9e6 HSPCs, e.g., CD34+ cells, per kilogram body weight of the patient to which they are to be administered. In embodiments, the population of cells, e.g., as described herein, comprises about 1e7 HSPCs, e.g., CD34+ cells, per kilogram body weight of the patient to which they are to be administered. In embodiments, the population of cells, e.g., as described herein, comprises about 2e7 HSPCs, e.g., CD34+ cells, per kilogram body weight of the patient to which they are to be administered. In embodiments, the population of cells, e.g., as described herein, comprises about 3e7 HSPCs, e.g., CD34+ cells, per kilogram body weight of the patient to which they are to be administered. In embodiments, the population of cells, e.g., as described herein, comprises about 4e7 HSPCs, e.g., CD34+ cells, per kilogram body weight of the patient to which they are to be administered. In embodiments, the population of cells, e.g., as described herein, comprises about 5e7 HSPCs, e.g., CD34+ cells, per kilogram body weight of the patient to which they are to be administered. In embodiments, the population of cells, e.g., as described herein, comprises about 6e7 HSPCs, e.g., CD34+ cells, per kilogram body weight of the patient to which they are to be administered. In embodiments, the population of cells, e.g., as described herein, comprises about 7e7 HSPCs, e.g., CD34+ cells, per kilogram body weight of the patient to which they are to be administered. In embodiments, the population of cells, e.g., as described herein, comprises about 8e7 HSPCs, e.g., CD34+ cells, per kilogram body weight of the patient to which they are to be administered. In embodiments, the population of cells, e.g., as described herein, comprises about 9e7 HSPCs, e.g., CD34+ cells, per kilogram body weight of the patient to which they are to be administered. In embodiments, the population of cells, e.g., as described herein, comprises about 1e8 HSPCs, e.g., CD34+ cells, per kilogram body weight of the patient to which they are to be administered. In embodiments, the population of cells, e.g., as described herein, comprises about 2e8 HSPCs, e.g., CD34+ cells, per kilogram body weight of the patient to which they are to be administered. In embodiments, the population of cells, e.g., as described herein, comprises about 3e8 HSPCs, e.g., CD34+ cells, per kilogram body weight of the patient to which they are to be administered. In embodiments, the population of cells, e.g., as described herein, comprises about 4e8 HSPCs, e.g., CD34+ cells, per kilogram body weight of the patient to which they are to be administered. In embodiments, the population of cells, e.g., as described herein, comprises about 5e8 HSPCs, e.g., CD34+ cells, per kilogram body weight of the patient to which they are to be administered.

[0836] In embodiments, the population of cells, e.g., as described herein, comprises from about 2e6 to about 10e6 HSPCs, e.g., CD34+ cells, per kilogram body weight of the patient to which they are to be administered. In embodiments, the population of cells, e.g., as described herein, comprises from 2e6 to 10e6 HSPCs, e.g., CD34+ cells, per kilogram body weight of the patient to which they are to be administered.

[0837] The cells of the invention may comprise a gRNA molecule of the present invention, or nucleic acid encoding said gRNA molecule, and a Cas9 molecule of the present invention, or nucleic acid encoding said Cas9 molecule. In an embodiment, the cells of the invention may comprise a ribonuclear protein (RNP) complex which comprises a gRNA molecule of the invention and a Cas9 molecule of the invention.

[0838] The cells of the invention are preferrably modified to comprise a gRNA molecule of the invention ex vivo, for example by a method described herein, e.g., by electroporation.

[0839] The cells of the invention include cells in which expression of one or more genes has been altered, for example, reduced or inhibited, by introduction of a CRISPR system comprising a gRNA of the invention. For example, the cells of the present invention may have a reduced level of BCL11a expression relative to unmodified cells. As another example, the cells of the present invention may have an increased level of fetal hemoglobin expression relative to unmodified cells. As another example, the cells of the present invention may have reduced level of beta globin expression relative to unmodified cells. Alternatively, or in addition, a cell of the invention may give rise, e.g., differentiate into, another type of cell, e.g., an erythrocyte, that has a reduced level of BCL11a expression relative to cells differentiated from unmodified cells. Alternatively, or in addition, a cell of the invention may give rise, e.g., differentiate into, another type of cell, e.g., an erythrocyte, that has an increased level of fetal hemoglobin expression relative to cells differentiated from unmodified cells. Alternatively, or in addition, a cell of the invention may give rise, e.g., differentiate into, another type of cell, e.g., an erythrocyte, that has a reduced level of beta globin expression relative to cells differentiated from unmodified cells.

[0840] The cells of the invention include cells in which expression of one or more genes has been altered, for example, reduced or inhibited, by introduction of a CRISPR system comprising a gRNA of the invention. For example, the cells of the present invention may have a reduced level of hemoglobin beta, for example a mutated or wild-type hemoglobin beta, expression relative to unmodified cells. In another aspect, the invention provides cells which are derived from, e.g., differentiated from, cells in which a CRISPR system comprising a gRNA of the invention has been introduced. In such aspects, the cells in which the CRISPR system comprising the gRNA of the invention has been introduced may not exhibit the reduced level of hemoglobin beta, for example a mutated or wild-type hemoglobin beta, but the cells derived from, e.g., differentiated from, said cells exhibit the reduced level of hemoglobin beta, for example a mutated or wild-type hemoglobin beta. In embodiments, the derivation, e.g., differentiation, is accomplished in vivo (e.g., in a patient). In embodiments the cells in which the CRISPR system comprising the gRNA of the invention has been introduced are CD34+ cells and the cells derived, e.g., differentiated, therefrom are of the erythroid lineage, e.g., red blood cells.

[0841] The cells of the invention include cells in which expression of one or more genes has been altered, for example, increased or promoted, by introduction of a CRISPR system comprising a gRNA of the invention. For example, the cells of the present invention may have an increased level of fetal hemoglobin expression relative to unmodified cells. In another aspect, the invention provides cells which are derived from, e.g., differentiated from, cells in which a CRISPR system comprising a gRNA of the invention has been introduced. In such aspects, the cells in which the CRISPR system comprising the gRNA of the invention has been introduced may not exhibit the increased level of fetal hemoglobin but the cells derived from, e.g., differentiated from, said cells exhibit the increased level of fetal hemoglobin. In embodiments, the derivation, e.g., differentiation, is accomplished in vivo (e.g., in a patient). In embodiments the cells in which the CRISPR system comprising the gRNA of the invention has been introduced are CD34+ cells and the cells derived, e.g., differentiated, therefrom are of the erythroid lineage, e.g., red blood cells.

[0842] In another aspect, the invention relates to cells which include an indel at (e.g., within) or near (e.g., within 20, 19, 18, 17, 16, 15, 14, 13, 12, 11, 10, 9, 8, 7, 6, 5, 4, 3, 2 or 1 nucleotides of) a nucleic acid sequence having complementarity to the gRNA molecule or gRNA molecules introduced into said cells. In embodiments, the indel is a frameshift indel. In embodiments, the indel is an indel listed in Table 15. In embodiments, the indel is an indel listed in Table 26, Table 27 or Table 37. In embodiments the invention pertains to a population of cells, e.g., as described herein, wherein the population of cells comprises cells having an indel listed in Table 15. In embodiments the invention pertains to a population of cells, e.g., as described herein, wherein the population of cells comprises cells having an indel listed in Table 26, Table 27 or Table 37.

[0843] In an aspect, the invention relates to a population of cells, e.g., a population of HSPCs, which comprises cells which include an indel, e.g., as described herein, e.g., an indel or pattern of indels described in FIG. 25, Table 15, Table 26, Table 27 or Table 37, at or near (e.g., within 20, 19, 18, 17, 16, 15, 14, 13, 12, 11, 10, 9, 8, 7, 6, 5, 4, 3, 2 or 1 nucleotides of) a nucleic acid sequence having complementarity to a gRNA molecule or gRNA molecules, e.g., as described herein, introduced into said cells, e.g., as described herein. In embodiments, the indel is a frameshift indel. In embodiments, 20%-100% of the cells of the population include said indel or indels. In embodiments, 30%-100% of the cells of the population include said indel or indels. In embodiments, 40%-100% of the cells of the population include said indel or indels. In embodiments, 50%-100% of the cells of the population include said indel or indels. In embodiments, 60%-100% of the cells of the population include said indel or indels. In embodiments, 70%-100% of the cells of the population include said indel or indels. In embodiments, 80%-100% of the cells of the population include said indel or indels. In embodiments, 90%-100% of the cells of the population include said indel or indels. In embodiments, the population of cells retains the ability to differentiate into multiple cell types, e.g., maintains the ability to differentiate into cells of erythroid lineage, e.g., red blood cells. In embodiments, the edited and differentiated cells (e.g., red blood cells) maintain the ability to proliferate, e.g., proliferate at least 5-fold, at least 10-fold, at least 15-fold, at least 20-fold, at least 25-fold, at least 30-fold, at least 35-fold, at least 40-fold, at least 45-fold, at least 50-fold or more after 7 days in erythroid differentiation medium (EDM), e.g., as described in the Examples, and/or, proliferate at least 30-fold, at least 35-fold, at least 40-fold, at least 45-fold, at least 50-fold, at least 55-fold, at least 60-fold, at least 65-fold, at least 70-fold, at least 75-fold, at least 80-fold, at least 85-fold, at least 90-fold, at least 95-fold, at least 100-fold, at least 110-fold, at least 120-fold, at least 130-fold, at least 140-fold, at least 150-fold, at least 200-fold, at least 300-fold, at least 400-fold, at least 500-fold, at least 600-fold, at least 700-fold, at least 800-fold, at least 900-fold, at least 1000-fold, at least 1100-fold, at least 1200-fold, at least 1300-fold, at least 1400-fold, at least 1500-fold or more after 21 days in erythroid differentiation medium (EDM), e.g., as described in the Examples,

[0844] In an embodiment, the invention provides a population of cells, e.g., CD34+ cells, of which at least 90%, e.g., at least 95%, e.g., at least 98%, of the cells of the population comprise an indel, e.g., as described herein (without being bound by theory, it is believed that introduction of a gRNA molecule or CRISPR system as described herein into a population of cells produces a pattern of indels in said population, and thus, each cell of the population which comprises an indel may not exhibit the same indel), at or near a site complementary to the targeting domain of a gRNA molecule described herein; wherein said cells maintain the ability to differentiate into cells of an erythroid lineage, e.g., red blood cells; and/or wherein said cells differentiated from the population of cells have an increased level of fetal hemoglobin (e.g., the population has a higher % F cells) relative to cells differentiated from a similar population of unmodified cells. In embodiments, the population of cells has undergone at least a 5-fold expansion ex vivo, e.g., in the media comprising Compound 4.

[0845] In embodiments, the indel is less than about 50 nucleotides, e.g., less than about 45, less than about 40, less than about 35, less than about 30 or less than about 25 nucleotides. In embodiments, the indel is less than about 25 nucleotides. In embodiments, the indel is less than about 20 nucleotides. In embodiments, the indel is less than about 15 nucleotides. In embodiments, the indel is less than about 10 nucleotides. In embodiments, the indel is less than about 9 nucleotides. In embodiments, the indel is less than about 9 nucleotides. In embodiments, the indel is less than about 7 nucleotides. In embodiments, the indel is less than about 6 nucleotides. In embodiments, the indel is less than about 5 nucleotides. In embodiments, the indel is less than about 4 nucleotides. In embodiments, the indel is less than about 3 nucleotides. In embodiments, the indel is less than about 2 nucleotides. In any of the aforementioned embodiments, the indel is at least 1 nucleotide. In embodiments, the indel is 1 nucleotide.

[0846] In an aspect, the invention provides a population of modified HSPCs or erythroid cells differentiated from said HSPCs (e.g., differentiated ex vivo or in a patient), e.g., as described herein, wherein at least 15%, at least 20%, at least 25%, at least 30%, at least 35%, at least 40%, at least 45%, at least 50%, at least 55%, at least 60%, at least 65%, at least 70%, at least 75%, at least 80%, at least 85%, at least 90%, or at least 95% of the cells are F cells. In embodiments, the population of cells contains (or is capable of differentiating, e.g., in vivo, into a population of erythrocytes that contains) a higher percent of F cells than a similar population of cells which have not had a gRNA molecule or gRNA molecules, e.g., as described herein, introduced into said cells. In embodiments, the population of cells has (or is capable of differentiating, e.g., in vivo, into a population of erythrocytes that has) at least a 20% increase, e.g, at least 21% increase, at least 22% increase, at least 23% increase, at least 24% increase, at least 25% increase, at least 26% increase, at least 27% increase, at least 28% increase, or at least 29% increase, in F cells relative to the similar population of cells which have not had a gRNA molecule or gRNA molecules, e.g., as described herein, introduced into said cells. In embodiments, the population of cells has (or is capable of differentiating, e.g., in vivo, into a population of erythrocytes that has) at least a 30% increase, e.g., at least a 35% increase, at least a 40% increase, at least a 45% increase, at least a 50% increase, at least a 55% increase, at least a 60% increase, at least a 65% increase, at least a 70% increase, at least a 75% increase, at least a 80% increase, at least a 85% increase, at least a 90% increase or at least a 95% increase, in F cells relative to the similar population of cells which have not had a gRNA molecule or gRNA molecules, e.g., as described herein, introduced into said cells. In embodiments, the population of cells has (or is capable of differentiating, e.g., in vivo, into a population of erythrocytes that has) at a 10-90%, a 20%-80%, a 20%-70%, a 20%-60%, a 20%-50%, a 20%-40%, a 20%-30%, a 25%-80%, a 25%-70%, a 25%-60%, a 25%-50%, a 25%-40%, a 25%-35%, a 25%-30%, a 30%-80%, a 30%-70%, a 30%-60%, a 30%-50%, a 30%-40%, or a 30%-35% increase in F cells relative to the similar population of cells which have not had a gRNA molecule or gRNA molecules, e.g., as described herein, introduced into said cells. In embodiments, the population of cells, e.g., as produced by a method described herein, comprises a sufficient number or cells and/or a sufficient increase in % F cells to treat a hemoglobinopathy, e.g., as described herein, e.g., sickle cell disease and/or beta thalassemia, in a patient in need thereof when introduced into said patient, e.g., in a therapeutically effective amount. In embodiments, the increase in F cells is as measured in an erythroid differentiation assay, e.g., as described herein.

[0847] In embodiments, including in any of the embodiments and aspects described herein, the invention relates to a cell, e.g., a population of cells, e.g., as modified by any of the gRNA, methods and/or CRISPR systems described herein, comprising F cells that produce at least 6 picograms fetal hemoglobin per cell. In embodiments, the F cells produce at least 7 picograms fetal hemoglobin per cell. In embodiments, the F cells produce at least 8 picograms fetal hemoglobin per cell. In embodiments, the F cells produce at least 9 picograms fetal hemoglobin per cell. In embodiments, the F cells produce at least 10 picograms fetal hemoglobin per cell. In embodiments, the F cells produce an average of between 6.0 and 7.0 picograms, between 7.0 and 8.0, between 8.0 and 9.0, between 9.0 and 10.0, between 10.0 and 11.0, or between 11.0 and 12.0 picograms of fetal hemoglobin per cell.

[0848] In embodiments, including in any of the aforementioned embodiments, the cell and/or population of cells of the invention includes, e.g., consists of, cells which do not comprise nucleic acid encoding a Cas9 molecule.

[0849] Methods of Treatment

[0850] Delivery Timing

[0851] In an embodiment, one or more nucleic acid molecules (e.g., DNA molecules) other than the components of a Cas system, e.g., the Cas9 molecule component and/or the gRNA molecule component described herein, are delivered. In an embodiment, the nucleic acid molecule is delivered at the same time as one or more of the components of the Cas system are delivered. In an embodiment, the nucleic acid molecule is delivered before or after (e.g., less than about 30 minutes, 1 hour, 2 hours, 3 hours, 6 hours, 9 hours, 12 hours, 1 day, 2 days, 3 days, 1 week, 2 weeks, or 4 weeks) one or more of the components of the Cas system are delivered. In an embodiment, the nucleic acid molecule is delivered by a different means than one or more of the components of the Cas system, e.g., the Cas9 molecule component and/or the gRNA molecule component, are delivered. The nucleic acid molecule can be delivered by any of the delivery methods described herein. For example, the nucleic acid molecule can be delivered by a viral vector, e.g., an integration-deficient lentivirus, and the Cas9 molecule component and/or the gRNA molecule component can be delivered by electroporation, e.g., such that the toxicity caused by nucleic acids (e.g., DNAs) can be reduced. In an embodiment, the nucleic acid molecule encodes a therapeutic protein, e.g., a protein described herein. In an embodiment, the nucleic acid molecule encodes an RNA molecule, e.g, an RNA molecule described herein.

[0852] Bi-Modal or Differential Delivery of Components

[0853] Separate delivery of the components of a Cas system, e.g., the Cas9 molecule component and the gRNA molecule component, and more particularly, delivery of the components by differing modes, can enhance performance, e.g., by improving tissue specificity and safety. In an embodiment, the Cas9 molecule and the gRNA molecule are delivered by different modes, or as sometimes referred to herein as differential modes. Different or differential modes, as used herein, refer modes of delivery, that confer different pharmacodynamic or pharmacokinetic properties on the subject component molecule, e.g., a Cas9 molecule, gRNA molecule, template nucleic acid, or payload. E.g., the modes of delivery can result in different tissue distribution, different half-life, or different temporal distribution, e.g., in a selected compartment, tissue, or organ.

[0854] Some modes of delivery, e.g., delivery by a nucleic acid vector that persists in a cell, or in progeny of a cell, e.g., by autonomous replication or insertion into cellular nucleic acid, result in more persistent expression of and presence of a component. Examples include viral, e.g., adeno associated virus or lentivirus, delivery.

[0855] By way of example, the components, e.g., a Cas9 molecule and a gRNA molecule, can be delivered by modes that differ in terms of resulting half life or persistent of the delivered component the body, or in a particular compartment, tissue or organ. In an embodiment, a gRNA molecule can be delivered by such modes. The Cas9 molecule component can be delivered by a mode which results in less persistence or less exposure of its to the body or a particular compartment or tissue or organ.

[0856] More generally, in an embodiment, a first mode of delivery is used to deliver a first component and a second mode of delivery is used to deliver a second component. The first mode of delivery confers a first pharmacodynamic or pharmacokinetic property. The first pharmacodynamic property can be, e.g., distribution, persistence, or exposure, of the component, or of a nucleic acid that encodes the component, in the body, a compartment, tissue or organ. The second mode of delivery confers a second pharmacodynamic or pharmacokinetic property. The second pharmacodynamic property can be, e.g., distribution, persistence, or exposure, of the component, or of a nucleic acid that encodes the component, in the body, a compartment, tissue or organ.

[0857] In an embodiment, the first pharmacodynamic or pharmacokinetic property, e.g., distribution, persistence or exposure, is more limited than the second pharmacodynamic or pharmacokinetic property.

[0858] In an embodiment, the first mode of delivery is selected to optimize, e.g., minimize, a pharmacodynamic or pharmacokinetic property, e.g., distribution, persistence or exposure.

[0859] In an embodiment, the second mode of delivery is selected to optimize, e.g., maximize, a pharmacodynamic or pharmcokinetic property, e.g., distribution, persistence or exposure.

[0860] In an embodiment, the first mode of delivery comprises the use of a relatively persistent element, e.g., a nucleic acid, e.g., a plasmid or viral vector, e.g., an AAV or lentivirus. As such vectors are relatively persistent product transcribed from them would be relatively persistent.

[0861] In an embodiment, the second mode of delivery comprises a relatively transient element, e.g., an RNA or protein.

[0862] In an embodiment, the first component comprises gRNA, and the delivery mode is relatively persistent, e.g., the gRNA is transcribed from a plasmid or viral vector, e.g., an AAV or lentivirus. Transcription of these genes would be of little physiological consequence because the genes do not encode for a protein product, and the gR As are incapable of acting in isolation. The second component, a Cas9 molecule, is delivered in a transient manner, for example as mRNA or as protein, ensuring that the full Cas9 molecule/gRNA molecule complex is only present and active for a short period of time.

[0863] Furthermore, the components can be delivered in different molecular form or with different delivery vectors that complement one another to enhance safety and tissue specificity.

[0864] Use of differential delivery modes can enhance performance,’ safety and efficacy. For example, the likelihood of an eventual off-target modification can be reduced. Delivery of immunogenic components, e.g., Cas9 molecules, by less persistent modes can reduce immunogenicity, as peptides from the bacterially-derived Cas enzyme are displayed on the surface of the cell by MHC molecules. A two-part delivery system can alleviate these drawbacks.

[0865] Differential delivery modes can be used to deliver components to different, but overlapping target regions. The formation active complex is minimized outside the overlap of the target regions. Thus, in an embodiment, a first component, e.g., a gRNA molecule is delivered by a first delivery mode that results in a first spatial, e.g., tissue, distribution. A second component, e.g., a Cas9 molecule is delivered by a second delivery mode that results in a second spatial, e.g., tissue, distribution. In an embodiment, the first mode comprises a first element selected from a liposome, nanoparticle, e.g., polymeric nanoparticle, and a nucleic acid, e.g., viral vector. The second mode comprises a second element selected from the group. In an embodiment, the first mode of delivery comprises a first targeting element, e.g., a cell specific receptor or an antibody, and the second mode of delivery does not include that element. In an embodiment, the second mode of delivery comprises a second targeting element, e.g., a second cell specific receptor or second antibody.

[0866] When the Cas9 molecule is delivered in a virus delivery vector, a liposome, or polymeric nanoparticle, there is the potential for delivery to and therapeutic activity in multiple tissues, when it may be desirable to only target a single tissue. A two-part delivery system can resolve this challenge and enhance tissue specificity. If the gRNA molecule and the Cas9 molecule are packaged in separated delivery vehicles with distinct but overlapping tissue tropism, the fully functional complex is only be formed in the tissue that is targeted by both vectors.

[0867] Candidate Cas molecules, e.g., Cas9 molecules, candidate gRNA molecules, candidate Cas9 molecule/gRNA molecule complexes, and candidate CRISPR systems, can be evaluated by art-known methods or as described herein. For example, exemplary methods for evaluating the endonuclease activity of Cas9 molecule are described, e.g., in Jinek el al., SCIENCE 2012; 337(6096):8 16-821.

### EXAMPLES

### Example 1

[0868] Guide Selection and Design

[0869] Initial guide selection was performed in silico using a human reference genome and user defined genomic regions of interest (e.g., a gene, an exon of a gene, non-coding regulatory region, etc), for identifying PAMs in the regions of interest. For each identified PAM, analyses were performed and statistics reported. gRNA molecules were further selected and rank-ordered based on a number of methods for determining efficiency and efficacy, e.g., as described herein.

[0870] Throughout the Examples, in the experiments below, either sgRNA molecules or dgRNA molecules were used. Unless indicated otherwise, where dgRNA molecules were used, the gRNA includes the following:

crRNA: [targeting domain]-[SEQ ID NO: 6607]
tracr (trRNA): SEQ ID NO: 6660

[0871] Unless indicated otherwise, in experiments employing a sgRNA molecule, the following sequence was used:

[targeting domain]-[SEQ ID NO: 6601]-UUUU

[0872] Unless indicated otherwise, in experiments employing a sgRNA molecule labeled “BC”, the following sequence was used:

[targeting domain]-[SEQ ID NO: 6604]-UUUU

[0873] Transfection of HEK-293 Cas9GFP Cells for Primary Guide Screening

[0874] Transfection of Cas9GFP-expressing HEK293 cells (HEK-293_Cas9GFP) was used for primary screening of target specific crRNAs. In this example, target specific crRNAs were designed and selected for primary screening using defined criteria including in silico off-target detection, e.g., as described herein. Selected crRNAs were chemically synthesized and delivered in a 96 well format. HEK-293-Cas9GFP cells were transfected with target crRNAs in a 1:1 ratio with stock trRNA. The transfection was mediated using lipofection technology according to manufacturer's protocol (Lipofectamine 2000, Life Technologies). Transfected cells were lysed 24 h following lipofection and editing (e.g., cleavage) was detected within lysates with the T7E1 assay and/or next generation sequencing (NGS; below).

[0875] T7E1 Assay

[0876] The T7E1 assay was used to detect mutation events in genomic DNA such as insertions, deletions and substitutions created through non-homologous end joining (NHEJ) following DNA cleavage by Cas9 (See Cho et al., Targeted genome engineering in human cells with the Cas9 RNA-guided endonuclease. Nature Biotechnology. 2013; 31, 230-232).

[0877] Genomic DNA regions that have been targeted for cutting by CRISPR/Cas9 were amplified by PCR, denatured at 95° C. for 10 minutes, and then re-annealed by ramping down from 95° C. to 25° C. at 0.5° C. per second. If mutations were present within the amplified region, the DNA combined to form heteroduplexes. The re-annealed heteroduplexes were then digested with T7E1 (New England Biolabs) at 37° C. for 25 minutes or longer. T7E1 endonuclease recognizes DNA mismatches, heteroduplexes and nicked double stranded DNA and generates a double stranded break at these sites. The resulting DNA fragments were analyzed using a Fragment Analyzer and quantified to determine cleavage efficiency.

[0878] Next-Generation Sequencing (NGS) and Analysis for On-Target Cleavage Efficiency and Indel Formation

[0879] To determine the efficiency of editing (e.g., cleaving) the target location in the genome, deep sequencing was utilized to identify the presence of insertions and deletions introduced by non-homologous end joining.

[0880] PCR primers were first designed around the target site, and the genomic area of interest PCR amplified. Additional PCR was performed according to manufacturer's protocols (Illumina) to add the necessary chemistry for sequencing. The amplicons were then sequenced on an Illumina MiSeq instrument. The reads were then aligned to the human reference genome (e.g., hg38) after eliminating those having low quality scores. From the resulting files containing the reads mapped to the reference genome (BAM files), reads which overlap the target region of interest were selected and the number of wild type reads versus the number of reads which contain an insertion or deletion was calculated. The editing percentage was then defined as the total number of reads with insertions or deletions over the total number of reads, including wild type. To determine the pattern of insertions and/or deletions that resulted from the edit, the aligned reads with indels were selected and the number of a reads with a given indel were summed. This information was then displayed as a list as well as visualized in the form on histograms which represent the frequency of each indel.

[0881] RNP Generation

[0882] The addition of crRNA and trRNA to Cas9 protein results in the formation of the active Cas9 ribonucleoprotein complex (RNP), which mediates binding to the target region specified by the crRNA and specific cleavage of the targeted genomic DNA. This complex was formed by loading trRNA and crRNA into Cas9, which is believed to cause conformational changes to Cas9 allowing it to bind and cleave dsDNA.

[0883] The crRNA and trRNA were separately denatured at 95° C. for 2 minutes, and allowed to come to room temperature. Cas9 protein (10 mg/ml) was added to 5×CCE buffer (20 mM HEPES, 100 mM KCl, 5 mM MgCl₂, 1 mM DTT, 5% glycerol), to which trRNA and the various crRNAs were then added (in separate reactions) and incubated at 37° C. for 10 minutes, thereby forming the active RNP complex. The complex was delivered by electroporation and other methods into a wide variety of cells, including HEK-293 and CD34+ hematopoietic cells.

[0884] Delivery of RNPs to CD34+ HSCs

[0885] Cas9 RNPs were delivered into CD34+ HSCs.

[0886] CD34+ HSCs were thawed and cultured (at ˜500,000 cells/ml) overnight in StemSpan SFEM (StemCell Technologies) media with IL12, SCF, TPO, Flt3L and Pen/Strep added. Roughly 90,000 cells were aliquoted and pelleted per each RNP delivery reaction. The cells were then resuspended in 60 ul P3 nucleofection buffer (Lonza), to which active RNP was subsequently added. The HSCs were then electroporated (e.g., nucleofected using program CA-137 on a Lonza Nucleofector) in triplicate (20 uL/electroporation). Immediately following electroporation, StemSpan SFEM media (with 112, SCF, TPO, Flt3L and Pen/Strep) was added to the HSCs, which were cultured for at least 24 hours. HSCs were then harvested and subjected to T7E1, NGS, and/or surface marker expression analyses.

[0887] HSC Functional Assay

[0888] CD34+ HSCs may be assayed for stem cell phenotype using known techniques such as flow cytometry or the in vitro colony forming assay. By way of example, cells were assayed by the in vitro colony forming assay (CFC) using the Methocult H4034 Optimum kit (StemCell Technologies) using the manufacturer's protocol. Briefly, 500-2000 CD34+ cells in <=100 ul volume are added to 1-1.25 ml methocult. The mixture was vortexed vigorously for 4-5 seconds to mix thoroughly, then allowed to rest at room temperature for at least 5 minutes. Using a syringe, 1-1.25 ml of MethoCult+ cells was transferred to a 35 mm dish or well of a 6-well plate. Colony number and morphology was assessed after 12-14 days as per the manufacturer's protocol.

[0889] In Vivo Xeno-Transplantation

[0890] HSCs are functionally defined by their ability to self-renew and for multi-lineage differentiation. This functionality can only be assessed in vivo. The gold-standard for determining human HSC function is through xeno-transplantation into the NOD-SCID gamma mouse (NSG) that through a series of mutations is severely immunocompromised and thus can act as a recipient for human cells. HSCs following editing will be transplanted into NSG mice to validate that the induced edit does not impact HSC function. Monthly peripheral blood analysis will be used to assess human chimerism and lineage development and secondary transplantation following 20 weeks will be used to establish the presence of functional HSCs.

[0891] Results

[0892] The results of editing using gRNA molecules (e.g., dgRNA molecules as describe above) described herein, in HEK293_Cas9GFP cells, as assayed by T7E1 (“T7”) and/or NGS are summarized in FIG. 1 (gRNAs molecules to +58 BCL11a enhancer region) and FIG. 2 (gRNA moleucles to +62 BCL11a enhancer region), and in the tables below, as indicated. Average editing in CD34+ HSPCs are reported in, for example, Table 10 (gRNAs molecules to +58 BCL11a enhancer region), Table 11 (gRNAs molecules to +62 BCL11a enhancer region), Table 12B (gRNAs molecules to +55 BCL11a enhancer region), and Table 13 (gRNAs molecules to the French HPFH region), below. Where T7E1 assay results are reported, “2” indicates high efficiency cutting; “1” indicates low efficiency cutting, and “0” indicates no cutting. In general, T7E1 results correlate with the quantitative cutting assayed by NGS. Top 15 gRNAs (as ranked by highest % editing in CD34+ cells) are shown in FIG. 11 (+58 BCL11a enhancer region) and FIG. 12 (+62 BCL11a enhancer region).

TABLE 10
Bcl11a +58 enhancer region crRNA 1° Screen results in
CD34+ HSPCs (by NGS, n = 3).

| | Average % | |
|---|---|---|
| Targeting Domain | Editing | |
| ID | (n = 3) | StDev |
| CR000242 | 1.4% | 0.3% |
| CR000243 | n/a | n/a |
| CR000244 | 3.7% | 1.0% |
| CR000245 | 24.7% | 1.4% |
| CR000246 | 24.2% | 0.3% |
| CR000247 | 3.6% | 0.6% |
| CR000248 | 6.4% | 0.5% |
| CR000249 | 13.3% | 0.6% |
| CR000250 | 4.8% | 0.5% |
| CR000251 | 4.7% | 0.5% |
| CR000252 | 2.7% | 0.5% |
| CR000253 | 9.0% | 0.6% |
| CR000255 | n/a | n/a |
| CR000256 | 1.3% | 0.2% |
| CR000257 | 2.4% | 0.4% |
| CR000258 | 2.0% | 0.0% |
| CR000259 | 3.9% | 0.4% |
| CR000260 | 32.7% | 2.3% |
| CR000261 | 17.9% | 0.9% |
| CR000264 | 2.1% | 0.2% |
| CR000266 | 2.9% | 0.1% |
| CR000267 | 3.9% | 0.1% |
| CR000268 | 6.3% | 0.6% |
| CR000269 | 4.4% | 0.2% |
| CR000270 | 2.7% | 0.9% |
| CR000271 | 7.2% | 1.4% |
| CR000272 | 11.9% | 2.9% |
| CR000273 | 3.1% | 0.2% |
| CR000274 | 1.4% | 0.1% |
| CR000275 | 9.6% | 0.6% |
| CR000276 | 14.5% | 0.5% |
| CR000277 | 8.6% | 0.5% |
| CR000278 | 4.8% | 0.6% |
| CR000279 | 6.5% | 0.9% |
| CR000280 | 7.9% | 0.8% |
| CR000281 | 3.3% | 0.7% |
| CR000282 | 10.1% | 1.2% |
| CR000283 | 4.7% | 0.2% |
| CR000284 | 5.8% | 0.1% |
| CR000285 | 8.9% | 1.2% |
| CR000286 | 20.2% | 1.1% |
| CR000287 | 10.1% | 1.0% |
| CR000288 | 1.6% | 0.1% |
| CR000289 | 3.0% | 0.4% |
| CR000290 | 2.3% | 0.4% |
| CR000291 | 2.8% | 0.1% |
| CR000292 | 9.9% | 0.9% |
| CR000293 | n/a | n/a |
| CR000294 | 2.7% | 0.5% |
| CR000295 | 1.9% | 0.4% |
| CR000296 | 2.8% | 0.4% |
| CR000297 | 5.7% | 0.4% |
| CR000298 | 2.2% | 0.2% |
| CR000299 | 2.9% | 0.2% |
| CR000300 | 2.3% | 0.2% |
| CR000301 | 10.2% | 0.8% |
| CR000302 | 5.0% | 0.6% |
| CR000303 | 3.7% | 0.3% |
| CR000304 | 6.2% | 0.8% |
| CR000305 | 7.7% | 2.2% |
| CR000306 | 4.0% | 2.2% |
| CR000307 | 8.8% | 3.6% |
| CR000308 | 39.9% | 1.7% |
| CR000309 | 38.3% | 8.2% |
| CR000310 | 56.8% | 1.0% |
| CR000311 | 46.0% | 1.2% |
| CR000312 | 48.5% | 1.7% |
| CR000313 | 41.2% | 4.4% |
| CR000314 | 29.9% | 0.9% |
| CR000315 | 32.0% | 2.9% |
| CR000316 | 3.9% | 1.0% |
| CR000317 | 2.8% | 0.3% |
| CR000318 | 2.6% | 0.2% |
| CR000319 | 7.9% | 1.8% |
| CR000320 | 1.9% | 0.1% |
| CR000321 | 13.2% | 1.7% |
| CR000322 | 5.2% | 0.8% |
| CR000323 | 20.3% | 2.1% |
| CR000324 | 2.2% | 0.4% |
| CR000325 | 8.4% | 0.9% |
| CR000326 | 1.4% | 0.2% |
| CR000327 | 6.9% | 1.7% |
| CR000328 | 2.6% | 0.4% |
| CR000329 | 1.1% | 0.1% |
| CR000330 | 1.7% | 0.2% |
| CR000331 | 22.0% | 0.9% |
| CR000332 | 3.2% | 1.0% |
| CR000333 | 3.8% | 0.7% |
| CR000334 | 3.2% | 0.1% |
| CR000335 | 2.7% | 0.3% |
| CR000336 | 2.2% | 0.2% |
| CR000337 | 7.2% | 1.0% |
| CR000338 | 10.3% | 1.8% |
| CR000339 | 4.2% | 0.2% |
| CR000340 | 4.6% | 0.6% |
| CR000341 | 7.5% | 1.4% |
| CR001124 | 26.1% | 2.0% |
| CR001125 | 8.4% | 1.6% |
| CR001126 | 17.2% | 5.8% |
| CR001127 | 7.4% | 2.3% |
| CR001128 | 9.0% | 0.9% |
| CR001129 | 16.5% | 6.0% |
| CR001130 | 11.1% | 8.3% |
| CR001131 | 54.1% | 4.9% |

TABLE 11
Bcl11a +62 enhancer region crRNA 1° Screen results in CD34+ HSPCs
(by NGS, n = 3).

| | Average % | |
|---|---|---|
| Targeting Domain ID | Edit (n = 3) | StDev |
| CR000171 | 4.4 | 0.7 |
| CR000172 | 4.6 | 2.4 |
| CR000173 | 3.1 | 0.7 |
| CR000174 | 27.6 | 6.5 |
| CR000175 | 14.7 | 1.0 |
| CR000176 | 2.1 | 0.6 |
| CR000177 | 7.6 | 2.3 |
| CR000178 | 7.1 | 1.7 |
| CR000179 | 7.7 | 1.8 |
| CR000180 | 2.8 | 0.5 |
| CR000181 | 25.6 | 3.8 |
| CR000182 | 27.6 | 3.5 |
| CR000183 | 30.5 | 6.9 |
| CR000184 | 4.2 | 1.9 |
| CR000185 | 11.4 | 0.7 |
| CR000186 | 7.2 | 3.7 |
| CR000187 | 46.3 | 2.2 |
| CR000188 | 21.0 | 6.0 |
| CR000189 | 22.3 | 2.1 |
| CR000190 | 20.2 | 5.7 |
| CR000191 | 38.2 | 7.9 |
| CR000192 | 5.4 | 1.8 |
| CR000193 | 14.7 | 2.0 |
| CR000194 | 13.5 | 0.7 |
| CR000195 | 8.2 | 1.2 |
| CR000196 | 27.0 | 6.4 |
| CR000197 | 6.6 | 0.6 |
| CR000198 | 8.7 | 3.2 |
| CR000199 | 3.3 | 1.3 |
| CR000200 | 6.9 | 0.5 |
| CR000201 | 1.6 | 0.5 |
| CR000202 | 28.1 | 5.6 |
| CR000203 | 43.7 | 0.5 |
| CR000204 | 35.1 | 2.2 |
| CR000205 | 53.6 | 0.8 |
| CR000206 | 52.8 | 6.0 |
| CR000207 | 2.5 | 0.3 |
| CR000208 | 31.5 | 7.5 |
| CR000209 | 13.5 | 2.9 |
| CR000210 | 28.7 | 6.6 |
| CR000211 | 59.3 | 5.5 |
| CR000212 | 40.0 | 1.6 |
| CR000213 | 13.6 | 7.1 |
| CR000214 | 9.4 | 0.7 |
| CR000215 | 37.0 | 6.9 |
| CR000216 | 25.3 | 2.6 |
| CR000217 | 7.6 | 1.6 |
| CR000218 | 5.1 | 1.3 |
| CR000221 | 12.4 | 3.5 |
| CR000222 | 7.2 | 2.6 |
| CR000223 | 8.4 | 2.1 |
| CR000224 | 13.9 | 5.3 |
| CR000225 | 10.3 | 4.4 |
| CR000227 | 12.6 | 1.8 |
| CR000228 | 13.5 | 4.8 |
| CR000229 | 3.2 | 0.8 |

TABLE 12A
Bcl11a +55 enhancer region crRNA 1° Screen results
in HEK-293-Cas9 Cells

| Targeting Domain | Average % Edit | |
|---|---|---|
| ID | (n = 3) | StDev |
| CR002142 | 25.0 | 2.0 |
| CR002143 | n/a | n/a |
| CR002144 | 51.2 | 8.3 |
| CR002145 | 51.0 | 3.3 |
| CR002146 | n/a | n/a |
| CR002147 | n/a | n/a |
| CR002148 | 13.7 | 4.3 |
| CR002149 | 22.3 | 4.5 |
| CR002150 | 43.8 | 9.0 |
| CR002151 | 31.1 | 0.6 |
| CR002152 | 33.2 | 8.7 |
| CR002153 | 24.5 | 7.8 |
| CR002154 | 62.1 | 3.9 |
| CR002155 | 48.2 | 10.9 |
| CR002156 | 57.4 | 8.5 |
| CR002157 | 46.6 | 4.3 |
| CR002158 | 11.0 | 1.7 |
| CR002159 | 13.7 | 2.3 |
| CR002160 | 37.8 | 0.8 |
| CR002161 | 61.5 | 4.6 |
| CR002162 | 47.0 | 14.0 |
| CR002163 | 52.2 | 9.6 |
| CR002164 | 58.5 | 4.4 |
| CR002165 | 61.5 | 6.8 |
| CR002166 | 42.6 | 11.3 |
| CR002167 | 37.8 | 4.7 |
| CR002168 | 32.0 | 12.9 |
| CR002169 | 48.5 | 6.3 |
| CR002170 | 44.8 | 2.9 |
| CR002171 | n/a | n/a |
| CR002172 | n/a | n/a |
| CR002173 | n/a | n/a |
| CR002174 | 59.8 | 3.8 |
| CR002175 | 22.1 | 1.3 |
| CR002176 | 35.4 | 5.9 |
| CR002177 | n/a | n/a |
| CR002178 | 25.9 | 3.2 |
| CR002179 | n/a | n/a |
| CR002180 | 57.6 | 6.4 |
| CR002181 | 63.8 | 3.9 |
| CR002182 | n/a | n/a |
| CR002183 | n/a | n/a |
| CR002184 | 30.0 | 4.0 |
| CR002185 | n/a | n/a |
| CR002186 | n/a | n/a |
| CR002187 | 51.6 | 2.9 |
| CR002188 | 35.8 | 8.7 |
| CR002189 | 62.7 | 6.0 |
| CR002190 | n/a | n/a |
| CR002191 | 37.4 | 7.4 |
| CR002192 | n/a | n/a |
| CR002193 | 6.1 | 1.7 |
| CR002194 | n/a | n/a |
| CR002195 | 60.0 | 9.4 |
| CR002196 | 42.9 | 13.7 |
| CR002197 | 52.2 | 2.8 |
| CR002198 | n/a | n/a |
| CR002199 | n/a | n/a |
| CR002200 | 4.3 | 1.0 |
| CR002201 | 1.8 | 0.3 |
| CR002202 | 2.6 | 0.3 |
| CR002203 | 50.7 | 5.3 |
| CR002204 | n/a | n/a |
| CR002205 | n/a | n/a |
| CR002206 | n/a | n/a |
| CR002207 | n/a | n/a |
| CR002208 | n/a | n/a |
| CR002209 | n/a | n/a |
| CR002210 | n/a | n/a |
| CR002211 | n/a | n/a |
| CR002212 | n/a | n/a |
| CR002213 | n/a | n/a |
| CR002214 | n/a | n/a |
| CR002215 | 51.7 | 8.9 |
| CR002216 | 14.1 | 8.3 |
| CR002217 | 50.1 | 10.5 |
| CR002218 | 45.0 | 19.4 |
| CR002219 | 30.7 | 14.7 |
| CR002220 | 44.7 | 13.3 |
| CR002221 | n/a | n/a |
| CR002222 | 64.0 | 3.9 |
| CR002223 | n/a | n/a |
| CR002224 | n/a | n/a |
| CR002225 | n/a | n/a |
| CR002226 | n/a | n/a |
| CR002227 | n/a | n/a |
| CR002228 | 10.4 | 5.6 |
| CR002229 | n/a | n/a |

n/a = not assessed

[0893] After the experiment above, the same guide RNA molecules were tested again in triplicate in both HEK-293-Cas9 cells and in CD34+ cells using a newly designed set of primers for the NGS analysis. The results are reported below in Table 12B.

TABLE 12B
Bcl11a +55 enhancer region crRNA screen results in
HEK-293-Cas9 Cells and in CD34+ HSPCs (by NGS, n = 3).

| | Editing % HEK- | Editing % |
|---|---|---|
| | 293-Cas9 Cells | CD34+ HSPCs |
| ID | (n = 3) | (n = 3) |
| CR002142 | 2.1 | 2.07 |
| CR002143 | 39.6 | 2.31 |
| CR002144 | 74.3 | 4.70 |
| CR002145 | 72.1 | 11.46 |
| CR002146 | 77.2 | 5.18 |
| CR002147 | 37.3 | 3.13 |
| CR002148 | 34.6 | 2.02 |
| CR002149 | 40.7 | 3.16 |
| CR002150 | 64.4 | 4.01 |
| CR002151 | 70.5 | 5.05 |
| CR002152 | 63.6 | 6.59 |
| CR002153 | 42.2 | 2.82 |
| CR002154 | 71.0 | 17.89 |
| CR002155 | 60.3 | 6.01 |
| CR002156 | 62.3 | 9.43 |
| CR002157 | 38.5 | 4.72 |
| CR002158 | 12.4 | 2.16 |
| CR002159 | 14.8 | 3.64 |
| CR002160 | 72.8 | 7.97 |
| CR002161 | 74.5 | 18.12 |
| CR002162 | 64.8 | 4.53 |
| CR002163 | 86.7 | 13.92 |
| CR002164 | 3.2 | 10.23 |
| CR002165 | 78.3 | 9.74 |
| CR002166 | 67.2 | 7.78 |
| CR002167 | 51.6 | 29.26 |
| CR002168 | 29.9 | 4.15 |
| CR002169 | 80.2 | 9.11 |
| CR002170 | 83.0 | 16.17 |
| CR002171 | 67.8 | 4.83 |
| CR002172 | 64.3 | 7.59 |
| CR002173 | 80.7 | 6.00 |
| CR002174 | 78.2 | 26.89 |
| CR002175 | 79.4 | 27.08 |
| CR002176 | 39.5 | 5.14 |
| CR002177 | 66.7 | 21.45 |
| CR002178 | 52.5 | 12.74 |
| CR002179 | 83.1 | 38.88 |
| CR002180 | 51.3 | 5.46 |
| CR002181 | 54.0 | 12.54 |
| CR002182 | 67.9 | 28.01 |
| CR002183 | 30.3 | 3.52 |
| CR002184 | 67.1 | 21.31 |
| CR002185 | 65.6 | 8.18 |
| CR002186 | 58.9 | 8.16 |
| CR002187 | 70.2 | 10.05 |
| CR002188 | 56.6 | 9.92 |
| CR002189 | 71.9 | 31.14 |
| CR002190 | 27.4 | 6.84 |
| CR002191 | 70.0 | 17.54 |
| CR002192 | 62.6 | 6.92 |
| CR002193 | 1.6 | 0.67 |
| CR002194 | 82.5 | 24.52 |
| CR002195 | 64.4 | 36.32 |
| CR002196 | 2.1 | 0.96 |
| CR002197 | 63.8 | 37.29 |
| CR002198 | 67.8 | 16.45 |
| CR002199 | 61.3 | 9.78 |
| CR002200 | 3.1 | 1.10 |
| CR002201 | 1.2 | 0.84 |
| CR002202 | 2.8 | 0.82 |
| CR002203 | 49.9 | 0.84 |
| CR002204 | 43.2 | 17.48 |
| CR002205 | 60.6 | 11.06 |
| CR002206 | 48.5 | 9.02 |
| CR002207 | 49.4 | 12.29 |
| CR002208 | 61.7 | 16.56 |
| CR002209 | 61.2 | 9.36 |
| CR002210 | 57.6 | 27.77 |
| CR002211 | 45.4 | 30.93 |
| CR002212 | 56.0 | 31.55 |
| CR002213 | 34.4 | 10.40 |
| CR002214 | 11.1 | 1.77 |
| CR002215 | 49.3 | 40.23 |
| CR002216 | 22.1 | 1.80 |
| CR002217 | 52.3 | 11.29 |
| CR002218 | 73.7 | 11.17 |
| CR002219 | 34.2 | 7.94 |
| CR002220 | 64.8 | 8.63 |
| CR002221 | 20.7 | 5.66 |
| CR002222 | 78.9 | 30.01 |
| CR002223 | 8.2 | 1.21 |
| CR002224 | 7.8 | n.d |
| CR002225 | n.d | n.d |
| CR002226 | 2.6 | n.d |
| CR002227 | n.d | n.d |
| CR002228 | 23.2 | 3.65 |
| CR002229 | 39.0 | n.d |

n.d. = not determined

TABLE 13
French HPFH region crRNA 1° Screen results in
HEK-293-Cas9 Cells and in CD34+ HSPCs (by NGS, n = 3).

| | Average Edit % | Average Edit % | StDev (%) for |
|---|---|---|---|
| Targeting | HEK-293-Cas9 | CD34+ HSPCs | % Edit in |
| Domain ID | (n = 3) | (n = 3) | CD34+ HSPCs |
| CR001016 | 33.1 | 24.0 | 1.2 |
| CR001017 | 30.4 | 19.5 | 1.5 |
| CR001018 | 46.5 | 53.0 | 3.4 |
| CR001019 | 45.9 | 57.6 | 2.3 |
| CR001020 | 62.1 | 47.7 | 9.3 |
| CR001021 | 29.1 | 34.2 | 1.8 |
| CR001022 | 66.1 | 66.2 | 2.3 |
| CR001023 | 27.3 | 46.0 | 6.1 |
| CR001024 | 62.5 | 73.4 | 6.9 |
| CR001025 | 25.5 | 24.5 | 1.6 |
| CR001026 | 61.4 | 72.1 | 2.9 |
| CR001027 | 23.3 | 33.2 | 2.2 |
| CR001028 | 47.7 | 72.1 | 4.9 |
| CR001029 | 53.9 | 61.2 | 5.7 |
| CR001030 | 49.2 | 49.9 | 29.0 |
| CR001031 | 42.7 | 65.0 | 9.3 |
| CR001032 | 67.6 | 50.1 | 9.7 |
| CR001033 | 15.3 | 44.5 | 3.2 |
| CR001034 | 28.5 | 52.9 | 2.7 |
| CR001035 | 16.9 | 28.5 | 16.4 |
| CR001036 | 28.0 | 68.3 | 3.7 |
| CR001037 | 52.7 | 53.2 | 4.2 |
| CR001038 | 1.9 | 23.7 | 20.6 |
| CR001039 | 2.2 | 35.8 | 2.8 |
| CR001040 | nd | n/a | 0.0 |
| CR001041 | nd | n/a | 0.0 |
| CR001042 | 2.7 | n/a | 0.0 |
| CR001043 | nd | n/a | 0.0 |
| CR001044 | 4.9 | 1.5 | 0.4 |
| CR001045 | 38.1 | 31.2 | 2.0 |
| CR001046 | 18.4 | 28.4 | 3.9 |
| CR001047 | nd | n/a | 0.0 |
| CR001048 | 1.6 | 0.2 | 0.3 |
| CR001049 | nd | n/a | 0.0 |
| CR001050 | nd | n/a | 0.0 |
| CR001051 | nd | n/a | 0.0 |
| CR001052 | nd | n/a | 0.0 |
| CR001053 | 5.8 | 4.4 | 0.7 |
| CR001054 | 9.0 | 4.1 | 0.4 |
| CR001055 | 5.2 | 0.1 | 0.1 |
| CR001056 | 7.7 | 5.0 | 0.3 |
| CR001057 | 25.2 | 7.8 | 0.8 |
| CR001058 | 41.6 | 29.5 | 6.7 |
| CR001059 | 5.2 | 4.9 | 0.1 |
| CR001060 | 43.5 | 18.7 | 5.2 |
| CR001061 | 21.7 | 4.7 | 0.8 |
| CR001062 | 12.2 | 5.2 | 1.1 |
| CR001063 | 16.6 | 21.5 | 1.6 |
| CR001064 | 6.0 | 4.2 | 0.7 |
| CR001065 | 43.0 | 20.0 | 1.4 |
| CR001066 | 11.1 | 4.2 | 0.4 |
| CR001067 | 25.7 | 7.9 | 3.5 |
| CR001068 | 11.3 | 5.9 | 1.6 |
| CR001069 | 15.1 | 2.9 | 0.2 |
| CR001070 | 38.2 | 11.1 | 3.1 |
| CR001071 | 34.6 | 8.5 | 0.2 |
| CR001072 | 22.8 | 3.5 | 0.4 |
| CR001073 | 45.2 | 18.1 | 4.1 |
| CR001074 | 40.1 | 38.1 | 2.5 |
| CR001075 | 53.0 | 29.2 | 1.8 |
| CR001076 | 25.6 | 1.8 | 0.1 |
| CR001077 | 8.9 | 12.2 | 0.4 |
| CR001078 | 10.9 | 17.7 | 3.3 |
| CR001079 | 18.3 | 7.8 | 0.9 |
| CR001080 | 21.3 | 17.4 | 5.6 |
| CR001081 | 22.0 | 21.4 | 0.5 |
| CR001082 | 5.4 | 8.5 | 0.6 |
| CR001083 | 12.3 | 11.6 | 0.5 |
| CR001084 | 25.4 | 9.5 | 4.5 |
| CR001085 | 18.3 | 12.4 | 1.7 |
| CR001086 | 25.3 | 4.4 | 2.0 |
| CR001087 | 16.4 | 6.9 | 0.9 |
| CR001088 | 9.6 | 18.4 | 1.9 |
| CR001089 | nd | 15.8 | 12.9 |
| CR001090 | 16.9 | 30.1 | 3.5 |
| CR001091 | 11.4 | 0.8 | 0.5 |
| CR001092 | 17.4 | 17.0 | 9.8 |
| CR001093 | 23.0 | 13.0 | 4.5 |
| CR001094 | 10.0 | 24.9 | 5.4 |
| CR001095 | 22.1 | 34.8 | 3.6 |
| CR001096 | 29.8 | 20.4 | 2.0 |
| CR001097 | 17.9 | 20.5 | 0.5 |
| CR001098 | 49.8 | 34.7 | 5.1 |
| CR001099 | 24.7 | 39.9 | 1.8 |
| CR001100 | nd | 33.2 | 2.8 |
| CR001101 | 16.9 | 24.7 | 2.1 |
| CR001102 | 29.4 | 13.9 | 0.7 |
| CR001103 | 9.9 | 8.6 | 2.2 |
| CR001104 | 11.3 | 3.3 | 0.7 |
| CR001105 | 5.0 | 3.6 | 0.9 |
| CR001106 | 15.7 | 13.1 | 1.6 |
| CR001107 | 31.2 | 8.5 | 4.5 |
| CR001108 | 16.1 | 3.2 | 0.5 |
| CR001109 | 12.1 | 4.6 | 2.1 |
| CR001110 | 23.5 | 6.0 | 3.0 |
| CR001111 | 12.3 | 2.6 | 1.3 |
| CR001132 | 18.7 | 3.4 | 0.4 |
| CR001133 | 35.4 | 27.0 | 4.2 |
| CR001134 | 12.3 | 0.3 | 0.2 |
| CR001135 | 57.8 | 16.2 | 2.7 |
| CR001136 | 7.1 | 1.7 | 0.5 |
| CR001137 | 31.2 | 6.2 | 2.7 |
| CR001138 | 45.4 | 9.6 | 1.2 |
| CR001139 | nd | 3.3 | 0.3 |
| CR001140 | 28.7 | 11.2 | 1.2 |
| CR001141 | 3.6 | 1.5 | 0.5 |
| CR001142 | 56.7 | 9.7 | 1.2 |
| CR001143 | 58.4 | 4.6 | 1.3 |
| CR001144 | 23.2 | 4.3 | 2.5 |
| CR001145 | 4.9 | 0.1 | 0.0 |
| CR001146 | 38.2 | 0.2 | 0.0 |
| CR001147 | 16.0 | 0.1 | 0.1 |
| CR001148 | 22.3 | 3.0 | 1.6 |
| CR001149 | 19.4 | 6.0 | 3.9 |
| CR001150 | 30.8 | 30.4 | 17.9 |
| CR001151 | 35.8 | 0.8 | 0.2 |
| CR001152 | 24.6 | 0.3 | 0.1 |
| CR001153 | 5.4 | 0.3 | 0.4 |
| CR001154 | 6.3 | 3.6 | 2.1 |
| CR001155 | nd | 2.1 | 0.6 |
| CR001156 | 19.6 | 4.8 | 0.8 |
| CR001157 | 16.4 | 2.7 | 0.6 |
| CR001158 | 36.5 | 5.1 | 3.2 |
| CR001159 | 42.9 | 7.7 | 1.0 |
| CR001160 | 32.5 | 8.5 | 1.9 |
| CR001161 | 20.5 | 10.3 | 1.9 |
| CR001162 | 35.0 | 30.5 | 4.5 |
| CR001163 | 9.9 | 3.3 | 0.5 |
| CR001164 | 23.3 | 14.4 | 8.8 |
| CR001165 | 5.5 | 1.5 | 0.4 |
| CR001166 | 49.8 | 27.1 | 4.4 |
| CR001167 | 13.8 | 6.0 | 0.8 |
| CR001168 | nd | 6.4 | 4.7 |
| CR001169 | 43.9 | n/a | 0.0 |
| CR001170 | 28.5 | 10.7 | 6.4 |
| CR001171 | 37.5 | 2.7 | 2.6 |
| CR001172 | 41.5 | 14.8 | 3.5 |
| CR001173 | 49.5 | 16.7 | 3.9 |
| CR001174 | 36.6 | 4.4 | 0.7 |
| CR001175 | 17.0 | 5.3 | 1.7 |
| CR001176 | 7.7 | 3.6 | 2.8 |
| CR001177 | 4.0 | 4.1 | 2.3 |
| CR001178 | nd | 27.0 | 15.6 |
| CR001179 | 59.0 | 27.9 | 1.5 |
| CR001180 | nd | 8.5 | 5.3 |
| CR001181 | 30.9 | 5.7 | 0.8 |
| CR001182 | 34.5 | 13.6 | 7.8 |
| CR001183 | 6.9 | 0.4 | 0.3 |
| CR001184 | 15.7 | 5.2 | 2.7 |
| CR001185 | 18.2 | 7.6 | 1.2 |
| CR001186 | 12.0 | 5.0 | 0.6 |
| CR001187 | 8.3 | 4.1 | 0.3 |
| CR001188 | 16.8 | 7.1 | 2.0 |
| CR001189 | 13.3 | 3.7 | 1.3 |
| CR001190 | nd | 5.6 | 1.1 |
| CR001191 | 39.5 | 4.8 | 1.0 |
| CR001192 | 27.5 | 3.9 | 1.3 |
| CR001193 | 17.1 | 1.5 | 1.9 |
| CR001194 | 17.8 | 5.9 | 4.1 |
| CR001195 | nd | 16.4 | 9.5 |
| CR001196 | 5.8 | 2.2 | 0.7 |
| CR001197 | 32.4 | 8.1 | 3.1 |
| CR001198 | 28.4 | 18.2 | 5.8 |
| CR001199 | 40.8 | 7.9 | 4.0 |
| CR001200 | 24.4 | 1.2 | 0.7 |
| CR001201 | 1.7 | 0.3 | 0.1 |
| CR001202 | 46.0 | 39.3 | 22.7 |
| CR001203 | 11.9 | 3.1 | 1.6 |
| CR001204 | 1.2 | 0.8 | 0.1 |
| CR001205 | 3.0 | 0.2 | 0.1 |
| CR001206 | 3.9 | 0.5 | 0.2 |
| CR001207 | 7.6 | 2.4 | 1.2 |
| CR001208 | 5.5 | 1.5 | 0.7 |
| CR001209 | 4.4 | 1.7 | 0.2 |
| CR001210 | 10.8 | 3.9 | 2.5 |
| CR001211 | 6.8 | 3.4 | 2.0 |
| CR001212 | 32.7 | 11.1 | 6.5 |
| CR001213 | 21.6 | 6.2 | 1.5 |
| CR001214 | 28.4 | 5.7 | 0.8 |
| CR001215 | 9.0 | 1.5 | 0.5 |
| CR001216 | nd | 2.5 | 1.4 |
| CR001217 | nd | n/a | 0.0 |
| CR001218 | 7.7 | 4.1 | 1.0 |
| CR001219 | 40.0 | 20.3 | 0.6 |
| CR001220 | 33.8 | n/a | 0.0 |
| CR001221 | 41.3 | n/a | 0.0 |
| CR001222 | 39.1 | 18.9 | 10.9 |
| CR001223 | 35.9 | n/a | 0.0 |
| CR001224 | 34.9 | 16.5 | 7.1 |
| CR001225 | 55.0 | 24.6 | 1.1 |
| CR001226 | 34.1 | 4.7 | 4.1 |
| CR001227 | 46.4 | 6.4 | 0.6 |
| CR003027 | 50.2 | 4.5 | nd |
| CR003028 | 3.0 | 2.2 | nd |
| CR003029 | 14.4 | 3.4 | nd |
| CR003030 | 20.2 | 5.8 | nd |
| CR003031 | 31.3 | 9.7 | nd |
| CR003032 | 15.1 | 4.4 | nd |
| CR003033 | 46.5 | 25.2 | nd |
| CR003034 | 55.2 | 11.8 | nd |
| CR003035 | 42.4 | 15.9 | nd |
| CR003036 | 17.4 | 6.1 | nd |
| CR003037 | 38.6 | 19.6 | nd |
| CR003038 | 47.1 | 24.6 | nd |
| CR003039 | 53.8 | 21.1 | nd |
| CR003040 | 35.9 | 6.1 | nd |
| CR003041 | 23.7 | 9.9 | nd |
| CR003042 | 35.5 | 8.7 | nd |
| CR003043 | 24.4 | 4.3 | nd |
| CR003044 | 54.1 | 16.2 | nd |
| CR003045 | 33.7 | 6.6 | nd |
| CR003046 | 34.8 | 3.6 | nd |
| CR003047 | 46.9 | 9.8 | nd |
| CR003048 | 12.6 | 1.7 | nd |
| CR003049 | 24.4 | 4.9 | nd |
| CR003050 | 19.6 | 2.9 | nd |
| CR003051 | 15.4 | 1.8 | nd |
| CR003052 | 15.7 | 7.8 | nd |
| CR003053 | 10.8 | 0.9 | nd |
| CR003054 | 16.7 | 2.9 | nd |
| CR003055 | 17.3 | 4.4 | nd |
| CR003056 | 46.3 | 19.3 | nd |
| CR003057 | 40.9 | 11.3 | nd |
| CR003058 | 40.0 | 8.9 | nd |
| CR003059 | 23.7 | <2% | nd |
| CR003060 | 16.8 | <2% | nd |
| CR003061 | 27.6 | <2% | nd |
| CR003062 | 3.9 | <2% | nd |
| CR003063 | 19.8 | 2.5 | nd |
| CR003064 | 19.6 | <2% | nd |
| CR003065 | 42.3 | 0.1 | nd |
| CR003066 | 36.5 | 0.0 | nd |
| CR003067 | 53.1 | 0.1 | nd |
| CR003068 | 11.5 | <2% | nd |
| CR003069 | 42.7 | 0.0 | nd |
| CR003070 | 49.0 | 0.1 | nd |
| CR003071 | 41.8 | <2% | nd |
| CR003072 | 27.2 | <2% | nd |
| CR003073 | 45.1 | 0.1 | nd |
| CR003074 | 40.2 | 0.1 | nd |
| CR003075 | 58.5 | 0.1 | nd |
| CR003076 | 28.5 | <2% | nd |
| CR003077 | 44.9 | 0.0 | nd |
| CR003078 | 43.9 | <2% | nd |
| CR003079 | 31.1 | <2% | nd |
| CR003080 | 41.1 | <2% | nd |
| CR003081 | 29.4 | <2% | nd |
| CR003082 | 30.8 | <2% | nd |
| CR003083 | 26.5 | 0.0 | nd |
| CR003084 | 32.3 | <2% | nd |
| CR003085 | 24.0 | 0.1 | nd |
| CR003086 | 40.8 | 10.8 | nd |
| CR003087 | 51.0 | 45.0 | nd |
| CR003088 | 25.5 | 9.7 | nd |
| CR003089 | 26.0 | 11.5 | nd |
| CR003090 | 15.2 | <2% | nd |
| CR003091 | 26.4 | 5.5 | nd |
| CR003092 | 4.9 | 2.1 | nd |
| CR003093 | 16.7 | 2.9 | nd |
| CR003094 | 39.5 | 4.7 | nd |
| CR003095 | 12.0 | 1.7 | nd |
| CR003096 | 22.9 | 4.0 | nd |

n/a = not assayed;
nd = not determined

[0894] Genome Editing at the BCL11a Enhancer Site

[0895] Synthetic sgRNA molecules containing targeting domains specific for genomic DNA within the +58 or +62 erythroid enhancer region of BCL11a were ordered. FIG. 5 shows the genomic DNA targeted by the sgRNAs, which were named sgEH1 through sgEH9.

sgEH1 Targeting Domain (CR00276):

(SEQ ID NO: 212)

AUCACAUAUAGGCACCUAUC
sgEH2 Targeting Domain (CR00275):

(SEQ ID NO: 211)

CACAGUAGCUGGUACCUGAU
sgEH8 Targeting Domain (CR00273):

(SEQ ID NO: 209)

CAGGUACCAGCUACUGUGUU
sgEH9 (CR00277) Targeting Domain:

(SEQ ID NO: 213)

UGAUAGGUGCCUAUAUGUGA

[0896] RNPs containing sgEH[X] precomplexed with Cas9 were introduced into CD34+ bone marrow cells (Bone Marrow CD34+ cells ordered from Lonza, Cat #2M-101C, Lot #466977, 30y, F, B (96.8%)) using electroporation (NEON electroporator). Cutting was determined in CD34+ stem cells using T7E1 and NGS. The results are summarized in FIG. 6A-D, which shows overall indel formation across four experiments (two experiments from two different donors), as well as the top indel patterns. sgEH1, 2 and 9 were able to direct cutting with high efficiency.

[0897] It was surprisingly found that across multiple experiments, including those using cells from different donors, the indel pattern remained constant (See FIG. 6A-D). That is, each gRNA gave a consistent pattern of indel formation. As well, deletions appeared to correlate with regions of microhomology near the cutting site.

[0898] To further investigate this phenomenon, gRNAs to the BCL11a locus were designed at tested using different biological samples as well as different delivery methods, and gRNA scaffolds. For this experiment, gRNAs with the following targeting domains were used:

G7 (also referred to as g7) Targeting domain:
GUGCCAGAUGAACUUCCCAU
(e.g., the 3′ 20 nt of SEQ ID NO: 1191)
G8 (also referred to as g8) Targeting domain:
CACAAACGGAAACAAUGCAA
(e.g., the 3′ 20 nt of SEQ ID NO: 1186)

[0899] In a first experiment, g7 and g8 were tested across two different biological samples. As shown in FIG. 7, the pattern of top 3 most prevalent indels for each gRNA was identical. Next, gRNA molecules comprising the G7 and G8 targeting domains were tested with a different tracrRNA component. In the previous experiments, SEQ ID NO: 6601, followed by —UUUU, was directly appended to the gRNA targeting domain to form the sgRNA. In the next set of experiments, SEQ ID NO: 6604, followed by —UUUU, was directly appended to the gRNA targeting domains of g7 and g8 to create sgRNA molecules with a different scaffold (gRNAs called g7BC or g8BC). As shown in FIG. 8, the indel pattern remained constant even when different sgRNA scaffolds are used. Finally, the indel pattern was compared using different delivery methods. Delivery of g7 to 293 cells via either RNP electroporation or by delivery of a g7-encoding plasmid via lipofectamine 2000 was investigated and the results reported in FIG. 9. As shown, the indel pattern remained the same. Together, these results strongly suggest that indel pattern formation is sequence-dependent. gRNA molecules that target sequences where cutting results in large deletions and/or frameshift deletions may be beneficial for loss of function.

[0900] Excision with Multiple Guides

[0901] G7 and g8, above, target genomic DNA at proximal sites (PAM sequences are within 50 nucleotides of each other within the BCL11a gene). To investigate the effect of simultaneously targeting two proximal sites, CD34+ cells were transfected with RNPs comprising gRNAs with the targeting domain of G7 as well as RNPs comprising gRNAs with the targeting domain of G8. Cutting efficiency and indel pattern was assessed by NGS. As shown in FIG. 10, the primary indel is a deflection of the nucleotides between the two gRNA binding sites. These results demonstrate that a plurality, e.g., 2, guides that bind in proximity may be used to effect an excision of the DNA located between the two binding sites.

[0902] Genome Editing in CD34+ Stem Cells

[0903] Genome editing at the BCL11a locus was demonstrated in CD34+ primary hematopoietic stem cells. Briefly, CD34+ cells were isolated from G-CSF mobilized peripheral blood from adult donors (AllCells) using immunoselection (Miltenyi) according to the manufacturer's instructions. Cell gating is shown in FIG. 3. Cells were aliquotted and cryopreserved. Thawed cells were seeded at 2×10⁵/ml in SFEM (StemCell Technologies)+1× antibiotic/antimycotic+50 ng/ml each cytokine (TPO, FLT3L, IL6 and SCF)+500 nM compound 4 and cultured for 5 days at 37C, 5% CO2 in a humidified incubator. Cell concentration after 5 days was 1×10⁶/ml.

[0904] Preincubated RNP complex consisting of 150 ng each Cas9 (Genscript #265425-7) and sgRNA (TriLink, comprising the sgBCL11A_7 Targeting Domain (i.e., the targeting domain of g7): GTGCCAGATGAACTTCCCATGTTTAAGAGCTATGCTGGAAACAGCATAGCAAGTTTAAATAA GGCTAGTCCGTTATCAACTTGAAAAAGTGGCACCGAGTCGGTGCTTTT) (SEQ ID NO: 2000) was added to 2×10⁵ cells and electroporated on the Neon system (Lifetechnologies) with pulse parameters: 1600 V, 20 ms, 1 pulse, according to manufacturer's protocols. Duplicate electroporations were performed. Mock electroporations were also performed in the absence of RNP complex. After electroporation, cells were seeded into 1 ml media to recover overnight.

[0905] The day following electroporation, 1/20 of the unsorted culture was seeded in SFEM (StemCell Technologies)+1× antibiotic/antimycotic+50 ng/ml each TPO, FLT3L, IL6, SCF, IL3 and GCSF for 6 days. The remaining cells were stained with antibodies to human CD34 and human CD90 and sorted by flow cytometry for CD34+CD90+ and CD34+CD90− populations. CD34+CD90+ cells are known to contain hematopoietic stem cells, as defined by long-term multi-lineage engraftment in immunodeficient mice (see Majeti et al. 2007 Cell Stem Cell 1, 635-645). Cell populations selected for sorting are indicated by the gates in the representative dot plot of FIG. 3. Sorted cells were cultured in SFEM (StemCell Technologies)+1× antibiotic/antimycotic+50 ng/ml each TPO, FLT3L, IL6, SCF, IL3 and GCSF for 6 days, at which point all cultures were harvested for analysis of genome editing.

[0906] Genomic DNA was purified from harvested cells and the targeted region was amplified with the following primers: BCL11A-7 F, gcttggctacagcacctctga (SEQ ID NO: 2018); BCL11A-7 R, ggcatggggttgagatgtgct (SEQ ID NO: 2019). PCR product was denatured and reannealed, followed by incubation with T7E1 (New England Biolabs) as per the manufacturer's recommendations. The reaction was then analyzed by agarose gel electrophoresis (FIG. 4). The upper band represents uncleaved homoduplex DNA and the lower bands indicate cleavage products resulting from heteroduplex DNA. The far left lane is a DNA ladder. Band intensity was calculated by peak integration of unprocessed images by ImageJ software. % gene modification (indel) was calculated as follows: % gene modification=100×(1−(1−fraction cleaved)^{1/2}), and is indicated below each corresponding lane of the gel.

[0907] The results are shown in FIG. 4. Gene editing efficiency in the hematopoietic stem cell-containing CD34+CD90+ population was equivalent to CD34+CD90− cells or unsorted. These experiments demonstrate that gene editing can be accomplished in CD34+ HSPCs and CD34+CD90+ cells that are further enriched in HSCs.

### Example 3. BCL11A Erythroid Enhancer Editing in Hematopoietic Stem and Progenitor Cells (HSPCs) Using CRISPR-Cas9 for Derepression of Fetal Globin Expression in Adult Erythroid Cells

[0908] Methods:

[0909] Human CD34⁺ cell culture. Human bone marrow CD34⁺ cells were purchased from either AllCells (Cat #: ABM017F) or Lonza (Cat #: 2M-101C) and expanded for 2 to 3 days using StemSpan SFEM (StemCell Technologies; Cat no. 09650) supplemented with 50 ng/mL of thrombopoietin (Tpo, Peprotech; Cat #300-18), 50 ng/mL of human Flt3 ligand (Flt-3L, Peprotech; Cat #300-19), 50 ng/mL of human stem cell factor (SCF, Peprotech; Cat #300-07), human interleukin-6 (IL-6, Peprotech; Cat #200-06), 1% L-glutamine; 2% penicillin/streptomycin, and Compound 4 (0.75 μM). After 2 to 3 days of expansion, the culture had expanded 2- to 3-fold relative to starting cell numbers purchased from AllCells and 1- to 1.5-fold from Lonza. These culture conditions were used for all CD34+ expansion steps, including both before and after introduction of the CRISPR/Cas systems as described herein.

[0910] Assembly of Cas9 and guide RNA ribonucleoprotein (RNP) complexes, preparation of HSC, and electroporation of RNP into HSC. Cas9-guide RNA ribonucleoprotein complexes (RNPs) were prepared immediately prior to electroporation. For formation of RNP using dual guide RNAs (dgRNAs), 3 pg of each of crRNA (in 2.24 μL) and tracr (in 1.25 μL) are first denatured at 95° C. for 2 min in separate tubes and then cooled to room temperature. For preparation of Cas9 protein, 7.3 pg of CAS9 protein (in 1.21 μL) was mixed with 0.52 μL of 5×CCE buffer (20 mM HEPES, 100 mM KCL, 5 mM MgCL2, 5% Glycerol and freshly added 1 mM DTT). Tracr was first mixed with the Cas9 preparation and incubated at 37° C. for 5 min. The crRNA was then added to Tracr/CAS9 complexes and incubated for 5 min at 37° C. The HSC were collected by centrifugation at 200×g for 15 min and resuspended in T buffer that comes with Neon electroporation kit (Invitrogen; Cat #: MPK1096) at a cell density of 2×10⁷/mL. The RNP mixed with 12 μL of cells by pipetting up and down 3 times gently. To prepare single guide RNA (sgRNA) and Cas9 complexes, 2.25 pg sgRNA (in 1.5 μL) was mixed with 2.25 pg Cas9 protein (in 3 μL) and incubated at RT for 5 min. The sgRNA/Cas9 complex was then mixed with 10.5 μL of 2×10⁷/mL cells by pipetting up and down several times gently and incubated at RT for 2 min. The RNP/cell mixture (10 μL) was transferred into Neon electroporation probe. The electroporation was performed with Neon transfection system (Invitrogen; MPK5000S) using 1700 volts/20 milliseconds and 1 pulse. After electroporation, the cells were transferred into 0.5 mL pre-warmed StemSpan SFEM medium supplemented with growth factors and cytokines as described above and cultured at 37° C. for 2 days.

[0911] Genomic DNA preparation. Genomic DNA was prepared from edited and unedited HSC at 48 hours post-electroporation. The cells were lysed in 10 mM Tris-HCL, pH 8.0; 0.05% SDS and freshly added Protease K of 25 μg/mL and incubated at 37° C. for 1 hour followed by additional incubation at 85° C. for 15 min to inactivate protease K.

[0912] T7E1 assay. To determine editing efficiency of HSCs, T7E1 and assay was performed. PCR was performed using Phusion Hot Start II High-Fidelity kit (Thermo Scientific; Cat #: F-549L) with the following cycling condition: 98° C. for 30″; 35 cycles of 98° C. for 5″, 68° C. for 20′, 72° C. for 30″; 72° C. for 5 min. The following primers were used: forward primer: 5′-AGCTCCAAACTCTCAAACCACAGGG-3′ (SEQ ID NO: 2001) and reverse primer: 5′-TACAATTTTGGGAGTCCACACGGCA-3′ (SEQ ID NO: 2002). The PCR products were denatured and re-annealed using the following condition: 95° C. for 5 min, 95-85° C. at −2° C./s, 85-25° C. at −0.1° C./s, 4° C. hold. After annealing, 1 μL of mismatch-sensitive T7 E1 nuclease (NEB, Cat #M0302L) was added into 10 μL of PCR product above and further incubated at 37° C. for 15 min for digestion of hetero duplexes, and the resulting DNA fragments were analyzed by agarose gel (2%) electrophoresis. The editing efficiency was quantified using ImageJ software (http://rsb.info.nih.gov/ij/).

[0913] Next generation sequencing (NGS). To determine editing efficiency more precisely and patterns of insertions and deletions (indels), the PCR products were subjected to next generation sequencing (NGS). The PCR were performed in duplicate using Titanium Taq PCR kit (Clontech Laboratories; Cat #: 639210) with the following cycling condition: 98° C. for 5 min; 30 cycles of 95° C. for 15 seconds, 68° C. for 15 seconds, 72° C. 1 min; 72° C. for 7 min. The following primers were used: forward primer: 5′-AGCTCCAAACTCTCAAACCACAGGG-3′ (SEQ ID NO: 2001) and reverse primer: 5′-TACAATTTTGGGAGTCCACACGGCA-3′ (SEQ ID NO: 2002). The PCR products were analyzed by 2% agarose gel electrophoresis and submitted for deep sequencing.

[0914] Flow cytometry analysis of HSPC culture. The HSPC were subjected to flow cytometry to characterize stem and progenitor cell populations. The percentage of CD34⁺, CD34⁺ CD90⁺ cell subsets, prior to and after genome editing was determined on aliquots of the cell cultures. The cells were incubated with anti-CD34 (BD Biosciences, Cat #555824), anti-CD90 (Biolegend, Cat #328109) in staining buffer, containing PBS supplemented with 0.5% BSA, at 4° C., in dark for 30 min. The cell viability is determined by 7AAD. The cells were washed with staining buffer and Multicolor FACS analysis was performed on a FACSCanto (Becton Dickinson). Flow cytometry results analyzed using Flowjo and the data were presented as percent CD34⁺, CD34⁺ CD90⁺ of the total cell population. Absolute numbers of each cell type population in the culture were calculated from the total number of cells multiplied by the percentage of each population.

[0915] In vitro erythropoiesis and FACS analysis for HbF containing erythroid cells. The genome edited HSC were subjected to in vitro erythroid differentiation 48 hours post-electroporation. Briefly, the edited HSC were cultured in erythroid differentiation medium (EDM) consisting of IMDM (Invitrogen, Cat #31980-097) supplemented with 330 μg/mL human holo-transferrin (Sigma, Cat #T0665), 10 μg/mL recombinant human insulin (Sigma, Cat #I3536), 2 IU/mL heparin (Sigma, Cat #H3149), 5% human plasma (Sigma, Cat #P9523), 3 IU/mL human erythropoietin (R&D, Cat #287-TC), 1% L-glutamine, and 2% penicillin/streptomycin. During days 0-7 of culture, EDM was further supplemented with 10⁻⁶M hydrocortisone (Sigma, Cat #H0888), 100 ng/mL human SCF (Peprotech, Cat #300-07), and 5 ng/mL human IL-3 (Peprotech, Cat #200-03) for 7-days. During days 7-11 of culture, EDM was supplemented with 100 ng/mL of human SCF only. During days 11-21 of culture, EDM has no additional supplements.

[0916] On days 7, 14 and 21 of the culture, the cells (2-10×10¹) were analyzed by intracellular staining for HbF expression. Briefly, the cells were collected by centrifugation at 350×g for 5 min and washed once with staining buffer (Biolegend, Cat #420201). The cells were then fixed with 0.5 mL of fixation buffer (Biolegend, Cat #420801) and washed three times with 2 mL of 1× intracellular staining permeabilization wash buffer (Biolegend, Cat #421002) by centrifugation at 350×g for 5 min. The cells were then incubated with 5 μL of anti-HbF antibody (Life technologies, Cat #MHFH01) in 100 μL of 1× intracellular staining perm wash buffer for 20 min at room temperature. The cells were washed twice with 2 mL of 1× intracellular staining Perm wash buffer and resuspend in 200 μL staining buffer and analyzed on FACS Canto (Becton Dickinson) for HbF expression. The results analyzed using Flowjo and data were presented as % of HbF positive cells (F-cells) in total cell population.

[0917] Gene expression assays. ˜1×10⁶ cells were used to purify RNA using RNeasy mini kit (Qiagen. Cat #74104). 200 to 400 ng RNA was used for 1S strand synthesize using qScript cDNA synthesis kit (Quanta, Cat #95047-500). Taq-man PCR was performed using Taq-Man Fast Advance PR Mix (Life technologies, Cat #4444963) and GAPDH (Life technologies, ID #Hs02758991_g1), HbB (Life technologies, ID #: Hs00747223_g1), HbG2/HbG1 (Life technologies, ID #Hs00361131g1) and BCL11A (Life technologies, ID #: Hs01093197 ml) according to suppliers protocol. The relative expression of each gene was normalized to GAPDH expression.

[0918] Colony forming unit cell assay. For colony forming unit (CFU) assay, 300 cells per 1.1 mL Methocult/35 mm dish in duplicate were plated in Methocult H4434 methylcellulose medium containing SCF, GM-CSF, IL-3, and erythropoietin (StemCell Technologies). Pen/Strep was added into the Methocult. The culture dishes were incubated in a humidified incubator at 37° C. Colonies containing at least 30 cells were counted at day 14 post-plating using StemVision (StemCell Technologies) to take the image of entire plate. The total number of colonies, number of CFU-GEMM (Granulocyte, Erythrocyte, Macrophage, Megakaryocyte), CFU-GM (Granulocyte, Macrophage), CFU-M (Macrophage), CFU-E (erythroid) and BFU-E (Burst-forming unit-erythroid) were then counted StemVision image analyzer software and confirmed by manually using StemVision Colony Marker software.

[0919] In vivo engraftment study. In vivo engraftment studies are conducted under protocol approved by IACUC. A fraction of final culture of genome edited HSC equivalent to 30,000 starting cells are injected intravenously via the tail vein into sub-lethally irradiated (200 cGY) 6- to 8-week old NSG mice. Engraftment is performed within 24 h after irradiation. Engraftment is monitored by flow cytometric analysis of blood collected at 4, 8, and 12 weeks post-infusion using anti-human CD45 and anti-mouse CD45 antibodies. The mice are sacrificed 13 weeks post-transplantation and bone marrow, spleen and thymus collected for analysis by flow cytometry and colony forming cell unit assay. For secondary engraftment, 50% of the bone marrow from each recipient mouse is transplanted into one secondary sub-lethally irradiated NSG mouse. Engraftment is monitored by flow cytometric analysis of blood collected at 4, 8, and 12 weeks post-infusion using panleukocyte marker, CD45 using anti-human CD45 and anti-mouse CD45 antibodies. Fifteen weeks after transplantation, bone marrow and spleen were harvested from the secondary mice and analyzed by flow cytometry and colony forming cell unit assay.

[0920] Results:

[0921] Without being bound by theory, it is believed that targeted genetic disruption of BCL11A erythroid enhancer in HSC will down regulate the expression of BCL11A selectively in erythroid cell lineage and relieve repression of γ-globin expression, allowing production of the red blood cells containing elevated HbF protein, F-cells. The elevated HbF prevents sickling of the red blood cells under deoxygenated conditions and will be therapeutic/curative for the patients of both β-thalassemia and SCD. Autologous hematopoietic stem cell transplantation (HSCT) with ex vivo genome edited HSC from SCD patients was also combined with stem cell expansion enhancing technology, e.g., an aryl hydrocarbon receptor (AHR) inhibitor, e.g., as described in WO2010/059401 (the contents of which are incorporated by reference in their entirety), e.g., Compound 4 to improve ex vivo expansion and increase the dose of gene modified HSC delivered.

[0922] For efficient genome editing via programmable nuclease, Cas9, the successful delivery of guide RNA (gRNA) and Cas9 protein into target cells and tissues is essential. Recent reports demonstrated that Cas9 ribonucleoprotein (RNP) complexes when delivered into target cells by electroporation can accomplish efficient and specific genome editing in several different cell types. Cas9-RNP complexes cleave chromosomal DNA almost immediately after delivery and are degraded rapidly in cells, reducing off-target effects. In contrast, use of plasmid and viral vector systems used to deliver Cas9 results in prolonged expression of the enzyme aggravating off-target effects associated with the system. Additionally, delivery of RNPs into the target cells requires no additional tools which would greatly facilitate translation of genome editing for therapeutic purposes in the clinic. Purified recombinant Cas9 protein and gRNA complexes (RNPs) were delivered into cultured HSPC and an overview experiments used are shown in FIG. 17.

[0923] Recombinant Cas9 protein was purified from Escherichia coli and complexed with synthetic dual gRNAs (dgRNA) that consist of crRNA and tracr or full-length single guide RNA (sgRNA) to generate ribonucleoprotein (RNP) complexes. The list and sequences of gRNAs used in the study are shown in Table 14. The RNP complexes were electroporated into healthy or SCD patient derived bone marrow CD34+ HSPC via electroporation as described under materials and methods. The cells were expanded for 2-days in HSC expansion medium containing Compound 4 prior to the delivery of RNP complexes. Actively dividing cells may facilitate uptake of RNP complexes delivered by electroporation. To facilitate recovery from transfection process, the cells were cultured for two additional days in the modified expansion medium containing compound 4. Viability of the cells 48 hours after electroporation was determined by flow cytometry using 7AAD. The viability was relatively high with >80% of the cells viable (FIG. 18) suggesting that the HSPC tolerated electroporation of the RNP complexes relatively well compared to other methods of Cas9 and gRNA delivery systems reported in the literature.

TABLE 14
List of gRNAs targeting BCL11A erythroid specific enhancer
used in the current study.

| Guide RNA | | | | | |
|---|---|---|---|---|---|
| targeting | Region/ | dgRNA | sgRNA | | |
| domain ID | strand | tested | tested | Target Sequence | Coordinates (hg38) |
| CR000245 | +58/+ | x | | tcagtgagatgagatatcaa | chr2: 60494483-60494502 |
| CR000246 | +58/+ | x | | cagtgagatgagatatcaaa | chr2: 60494484-60494503 |
| CR000260 | +58/− | x | | tgtaactaataaataccagg | chr2: 60494790-60494809 |
| CR001124 | +58/− | x | | ttagggtgggggcgtgggtg | chr2: 60495217-60495236 |
| CR001131 | +58/− | x | | attagggtgggggcgtgggt | chr2: 60495218-60495237 |
| CR000309 | +58/+ | x | X | cacgcccccaccctaatcag | chr2: 60495221-60495240 |
| CR000308 | +58/− | x | X | tctgattagggtgggggcgt | chr2: 60495222-60495241 |
| CR000310 | +58/− | x | X | ttggcctctgattagggtgg | chr2: 60495228-60495247 |
| CR000311 | +58/− | x | X | tttggcctctgattagggtg | chr2: 60495229-60495248 |
| CR000312 | +58/− | x | X | gtttggcctctgattagggt | chr2: 60495230-60495249 |
| CR000313 | +58/− | x | X | ggtttggcctctgattaggg | chr2: 60495231-60495250 |
| CR000314 | +58/− | x | X | aagggtttggcctctgatta | chr2: 60495234-60495253 |
| CR000315 | +58/− | x | X | gaagggtttggcctctgatt | chr2: 60495235-60495254 |
| CR001128/ | +58/+ | | X | atcagaggccaaacccttcc | chr2: 60495236-60495255 |
| sgEH15 | | | | | |
| CR001127/ | +58/− | | X | cacaggctccaggaagggtt | chr2: 60495247-60495266 |
| sgEH14 | | | | | |
| CR001126/ | +58/− | x | X | tttatcacaggctccaggaa | chr2: 60495252-60495271 |
| sgEH13 | | | | | |
| CR001125/ | +58/− | | X | ttttatcacaggctccagga | chr2: 60495253-60495272 |
| sgEH12 | | | | | |
| CR000316/ | +58/− | | X | ttgcttttatcacaggctcc | chr2: 60495257-60495276 |
| sgEH11 | | | | | |
| CR000317/ | +58/− | | | ctaacagttgcttttatcac | chr2: 60495264-60495283 |
| sgEH4 | | | | | |

[0924] The T7E1 assay is a convenient method to assess editing at specific sites in the genome. The genomic DNA was extracted from the HSPC 2-days post-electroporation. The targeted BCL11A erythroid enhancer region was amplified by polymerase chain reaction (PCR). The PCR products were subjected to T7E1 assay. The end products of T7E1 assay were subjected to 2% agarose gel electrophoresis and the percent edited alleles quantified by imageJ (http://rsb.info.nih.gov/ij/). Expected PCR product sizes and approximate expected sizes of T7E1-digested fragments are shown in FIG. 19. The total editing frequencies are indicated as percentage of total edits below the agarose gel image. The genome editing at the BCL11A locus was observed in the cells treated with BCL11A Cas9 RNPs but not in mock electroporated control cells (FIG. 19).

[0925] The genomic PCR products of the +58 erythroid enhancer region of BCL11A were also subjected to next generation sequencing (NGS). The NGS facilitates simultaneous monitoring of a large number of samples giving a global view of the alleles. Moreover, it provides information on the heterogeneity of insertions and deletions (indels). The sequences were compared with the sequences from control (mock) treated cells. The results of sequence analysis showed that CRISPR-Cas9 induced double stranded breaks were repaired by NHEJ resulting in variable frequencies of small deletions and insertions (indels) near Cas9 cleavage site located in +58 BCL11A erythroid enhancer region (FIG. 20 and Table 15). Overall, the observed editing efficiencies was higher for sgRNAs compared to dgRNAs targeting the same sequence, with 12 out 14 sgRNA producing editing at more than 50% alleles (FIG. 20 and Table 15), though (without being bound by theory) the differences in efficiency between sgRNA and dgRNA may be affected by the source of the materials.

TABLE 15
Genotypes identified by NGS in HSPCs edited with Cas9-RNP. The nucleotide sequence
for each population is given. The target sequence targeted by each gRNA is indicated
above each indel population, with the PAM sequences indicated in lower case. Dashes
denote deleted bases and lowercase letters denote insertions. In the description of the
gRNA, dgRNA refers to dual gRNA molecules comprising the indicated targeting domain
sgRNA indicates single gRNA molecules comprising the indicated targeting domain.
Where multiple experiments were run with the same dgRNA or sgRNA, successive
experiments are labeled “dgRNA,” “d1gRNA”, “d2gRNA,” etc.

| | | % | Indel |
|---|---|---|---|
| gRNA | Variant | Allele | length |
| | CTAACAGTTGCTTTTATCACagg | | |
| CR00317- | TAGTGCAAGCTAACAG---------------GCTCCAGGAAGGGTTTGGCCTCTGATTAG | 5.96% | −15 |
| dgRNA | | | |
| CR00317- | TAGTGCAAGCTAACAGTTGCTTTTATtCACAGGCTCCAGGAAGGGTTTGGCCTCTGATTAG | 5.77% | 1 |
| dgRNA | | | |
| CR00317- | TAGTGCAAGCTAACAGTTGCT-------------CCAGGAAGGGTTTGGCCTCTGATTAG | 4.69% | −13 |
| dgRNA | | | |
| CR00317- | TAGTGCAAGCTAACAGTTGCTTTTATCA--GGCTCCAGGAAGGGTTTGGCCTCTGATTAG | 0.90% | −2 |
| dgRNA | | | |
| CR00317- | TAGTGCAAGCTAACAGTTGCTTTTA-CACAGGCTCCAGGAAGGGTTTGGCCTCTGATTAG | 0.88% | −1 |
| dgRNA | | | |
| CR00317- | TAGTGCAAGCTAACAGTTGCTTTT--CACAGGCTCCAGGAAGGGTTTGGCCTCTGATTAG | 0.77% | −2 |
| dgRNA | | | |
| CR00317- | TAGTGCAAGCT-----------------------CCAGGAAGGGTTTGGCCTCTGATTAG | 0.67% | −23 |
| dgRNA | | | |
| | ATCAGAGGCCAAACCCTTCCacc | | |
| CR001128- | AGCTAACAGTTGCTTTTATCACAGGCTCCAGGA-GGGTTTGGCCTCTGATTAGGGTGGGG | 20.07% | −1 |
| dgRNA | | | |
| CR001128- | AGCTAACAGTTGCTTTTATCACAGGCTCCAGG-----TTTGGCCTCTGATTAGGGTGGGG | 5.00% | −5 |
| dgRNA | | | |
| CR001128- | AGCTAACAGTTGCTTTTATCACAGGCTCCAGGAAaGGGTTTGGCCTCTGATTAGGGTGGGG | 4.84% | 1 |
| dgRNA | | | |
| CR001128- | AGCTAACAGTTGCTTTTATCACAGGCTCCAGG----GTTTGGCCTCTGATTAGGGTGGGG | 4.01% | −4 |
| dgRNA | | | |
| CR001128- | AGCTAACAGTTGCTTTTATCACAGGCTCCAGGA--GGTTTGGCCTCTGATTAGGGTGGGG | 2.99% | −2 |
| dgRNA | | | |
| CR001128- | AGCTAACAGTTGCTTTTATCACAGGCTCCAGGA-GGGTTTGGCCTCTGATTAGGGTGGGG | 23.33% | −1 |
| sgRNA | | | |
| CR001128- | AGCTAACAGTTGCTTTTATCACAGGCTCCAGGAAGG-TTTGGCCTCTGATTAGGGTGGGG | 5.77% | −1 |
| sgRNA | | | |
| CR001128- | AGCTAACAGTTGCTTTTATCACAGGCTCCAGGAAaGGGTTTGGCCTCTGATTAGGGTGGGG | 5.77% | 1 |
| sgRNA | | | |
| CR001128- | AGCTAACAGTTGCTTTTATCACAGGCTCCAGGA--GGTTTGGCCTCTGATTAGGGTGGGG | 5.37% | −2 |
| sgRNA | | | |
| CR001128- | AGCTAACAGTTGCTTTTATCACAGGCTCCAGGAAG--TTTGGCCTCTGATTAGGGTGGGG | 3.70% | −2 |
| sgRNA | | | |
| CR001128- | AGCTAACAGTTGCTTTTATCACAGGCTCCAGG----------CCTCTGATTAGGGTGGGG | 3.62% | −10 |
| sgRNA | | | |
| CR001128- | AGCTAACAGTTGCTTTTATCACAGGC-----------------CTCTGATTAGGGTGGGG | 3.54% | −17 |
| sgRNA | | | |
| CR001128- | AGCTAACAGTTGCTTTTATCACAGGCTCCAGGA---GTTTGGCCTCTGATTAGGGTGGGG | 2.97% | −3 |
| sgRNA | | | |
| | TTGCTTTTATCACAGGCTCCagg | | |
| CR00316- | AGCTAACAGTTGCTTTTATCACAGG-------AAGGGTTTGGCCTCTGATTAGGGTGGGG | 16.03% | −7 |
| sgRNA | | | |
| CR00316- | AGCTAACAGTTGCTTTTATCACAGGCTtCCAGGAAGGGTTTGGCCTCTGATTAGGGTGGGG | 8.25% | 1 |
| sgRNA | | | |
| CR00316- | AGCTAACAGTTGCTTTTATC--------CAGGAAGGGTTTGGCCTCTGATTAGGGTGGGG | 8.04% | −8 |
| sgRNA | | | |
| CR00316- | AGCTAACAGTTGCTTTTATCACAGGCcTCCAGGAAGGGTTTGGCCTCTGATTAGGGTGGGG | 4.07% | 1 |
| sgRNA | | | |
| CR00316- | AGCTAACAGTTGCTTTTATCACAGGC-CCAGGAAGGGTTTGGCCTCTGATTAGGGTGGGG | 3.55% | −1 |
| sgRNA | | | |
| CR00316- | AGCTAACAGTTGCTTTTATCACAGGC--CAGGAAGGGTTTGGCCTCTGATTAGGGTGGGG | 2.37% | −2 |
| sgRNA | | | |
| CR00316- | AGCTAACAGTTGCTTTTATCACAGG-------AAGGGTTTGGCCTCTGATTAGGGTGGGG | 2.49% | −7 |
| dgRNA | | | |
| CR00316- | AGCTAACAGTTGCTTTTATCACAGGCTtCCAGGAAGGGTTTGGCCTCTGATTAGGGTGGGG | 1.78% | 1 |
| dgRNA | | | |
| CR00316- | AGCTAACAGTTGCTTTTATC--------CAGGAAGGGTTTGGCCTCTGATTAGGGTGGGG | 1.32% | −8 |
| dgRNA | | | |
| CR00316- | AGCTAACAGTTGCTTTTATCACAGGCcTCCAGGAAGGGTTTGGCCTCTGATTAGGGTGGGG | 1.26% | 1 |
| dgRNA | | | |
| CR00316- | AGCTAACAGTTGCTTTTATCACAGG-------AAGGGTTTGGCCTCTGATTAGGGTGGGG | 6.94% | −7 |
| d1gRNA | | | |
| CR00316- | AGCTAACAGTTGCTTTTATC--------CAGGAAGGGTTTGGCCTCTGATTAGGGTGGGG | 4.99% | −8 |
| d1gRNA | | | |
| CR00316- | AGCTAACAGTTGCTTTTATCACAGGCTtCCAGGAAGGGTTTGGCCTCTGATTAGGGTGGGG | 4.69% | 1 |
| d1gRNA | | | |
| CR00316- | AGCTAACAGT-------------------------------------GATTAGGGTGGGG | 2.90% | −37 |
| d1gRNA | | | |
| CR00316- | AGCTAACAGTTGCTTTTATCACAGGC-CCAGGAAGGGTTTGGCCTCTGATTAGGGTGGGG | 1.54% | −1 |
| d1gRNA | | | |
| CR00316- | AGCTAACAGTTGCTTTTATCACAGG-------AAGGGTTTGGCCTCTGATTAGGGTGGGG | 11.64% | −7 |
| d2gRNA | | | |
| CR00316- | AGCTAACAGTTGCTTTTATC--------CAGGAAGGGTTTGGCCTCTGATTAGGGTGGGG | 6.04% | −8 |
| d2gRNA | | | |
| CR00316- | AGCTAACAGTTGCTTTTATCACAGGCTtCCAGGAAGGGTTTGGCCTCTGATTAGGGTGGGG | 5.40% | 1 |
| d2gRNA | | | |
| CR00316- | AGCTAACAGTTGCTTTTATCACAGGCcTCCAGGAAGGGTTTGGCCTCTGATTAGGGTGGGG | 1.80% | 1 |
| d2gRNA | | | |
| CR00316- | AGCTAACAGTTGCTTTTATCACAGGC-----GAAGGGTTTGGCCTCTGATTAGGGTGGGG | 1.43% | −5 |
| d2gRNA | | | |
| | TTTTATCACAGGCTCCAGGAagg | | |
| CR001125- | AACAGTTGCTTTTATCACAGGCTCCAaGGAAGGGTTTGGCCTCTGATTAGGGTGGGGGCGT | 13.50% | 1 |
| dgRNA | | | |
| CR001125- | AACAGTTGCTTTTATCACAGGC-----------------CTCTGATTAGGGTGGGGGCGT | 1.82% | −17 |
| dgRNA | | | |
| CR001125- | AACAGTTGCTTTTATCACAGG-----------GTTTGGCCTCTGATTAGGGTGGGGGCGT | 1.76% | −11 |
| dgRNA | | | |
| CR001125- | AACAGTTGCTTTTATCACAGG-------AAGGGTTTGGCCTCTGATTAGGGTGGGGGCGT | 1.59% | −7 |
| dgRNA | | | |
| CR001125- | AACAGTTGCTTTT------------------------------------GGTGGGGGCGT | 1.33% | −36 |
| dgRNA | | | |
| CR001125- | AACAGTTGCTTTTATCACAGGCTCCAaGGAAGGGTTTGGCCTCTGATTAGGGTGGGGGCGT | 26.27% | 1 |
| sgRNA | | | |
| CR001125- | AACAGTTGCTTTTATCACAGG-----------GTTTGGCCTCTGATTAGGGTGGGGGCGT | 4.64% | −11 |
| sgRNA | | | |
| CR001125- | AACAGTTGCTTTTATCACAGG-------AAGGGTTTGGCCTCTGATTAGGGTGGGGGCGT | 4.11% | −7 |
| sgRNA | | | |
| CR001125- | AACAGTTGCTTTTATCACAGGC-----------------CTCTGATTAGGGTGGGGGCGT | 2.66% | −17 |
| sgRNA | | | |
| CR001125- | AACAGTTGCTTTTATCACAGGCT------------TGGCCTCTGATTAGGGTGGGGGCGT | 2.58% | −12 |
| sgRNA | | | |
| CR001125- | AACAGTTGCTTTTATCACAGGCTCC-GGAAGGGTTTGGCCTCTGATTAGGGTGGGGGCGT | 1.84% | −1 |
| sgRNA | | | |
| | TTTATCACAGGCTCCAGGAAggg | | |
| CR001126- | ACAGTTGCTTTTATCACAGGCTCCAG-AAGGGTTTGGCCTCTGATTAGGGTGGGGGCGTG | 9.38% | −1 |
| dgRNA | | | |
| CR001126- | ACAGTTGCTTTTATCACAGG-----------GTTTGGCCTCTGATTAGGGTGGGGGCGTG | 3.28% | −11 |
| dgRNA | | | |
| CR001126- | ACAGTTGCTTTTATCACAGGCTCCAGGgAAGGGTTTGGCCTCTGATTAGGGTGGGGGCGTG | 2.91% | 1 |
| dgRNA | | | |
| CR001126- | ACAGTTGCTTTTATCACAGGC-----------------CTCTGATTAGGGTGGGGGCGTG | 2.82% | −17 |
| dgRNA | | | |
| CR001126- | ACAGTTGCTTTT---------------------------------------GGGGGCGTG | 1.61% | −39 |
| dgRNA | | | |
| CR001126- | ACAGTTGCTTT----------------------------------------GGGGGCGTG | 1.12% | −40 |
| dgRNA | | | |
| CR001126- | ACAGTTGCTTTTATCACAGGCTCCAG-AAGGGTTTGGCCTCTGATTAGGGTGGGGGCGTG | 12.70% | −1 |
| sgRNA | | | |
| CR001126- | ACAGTTGCTTTTATCACAGG-----------GTTTGGCCTCTGATTAGGGTGGGGGCGTG | 4.37% | −11 |
| sgRNA | | | |
| CR001126- | ACAGTTGCTTTTATCACAGGCTCCAGGgAAGGGTTTGGCCTCTGATTAGGGTGGGGGCGTG | 3.22% | 1 |
| sgRNA | | | |
| CR001126- | ACAGTTGCTTTTATCACAGGCTCCAGaT------------------AAGGTGGGGGCGTG | 2.96% | −18 |
| sgRNA | | | |
| CR001126- | ACAGTTGCTTTTATCACAGGC-----------------CTCTGATTAGGGTGGGGGCGTG | 2.68% | −17 |
| sgRNA | | | |
| CR001126- | ACAGTTGCTTTTATCACAGGCTCCAGG----GTTTGGCCTCTGATTAGGGTGGGGGCGTG | 2.59% | −4 |
| sgRNA | | | |
| CR001126- | ACAGTTGCTTTTATCACAGGCTCCAGcGAAGGGTTTGGCCTCTGATTAGGGTGGGGGCGTG | 1.80% | 1 |
| sgRNA | | | |
| CR001126- | ACAGTTGCTTTTATCACAGGCTCC-GGAAGGGTTTGGCCTCTGATTAGGGTGGGGGCGTG | 1.74% | −1 |
| sgRNA | | | |
| | CACAGGCTCCAGGAAGGGTTtgg | | |
| CR001127- | TGCTTTTATCACAGGCTCCAGGAAGG-TTTGGCCTCTGATTAGGGTGGGGGCGTGGGTGG | 4.00% | −1 |
| dgRNA | | | |
| CR001127- | TGCTTTTATCACAGGCcT-----------------------------GGGGCGTGGGTGG | 2.35% | −29 |
| dgRNA | | | |
| CR001127- | TGCTTTTATCACAGGC------------------------------------GTGGGTGG | 2.19% | −36 |
| dgRNA | | | |
| CR001127- | TGCTTTTATCACAGGC-----------------CTCTGATTAGGGTGGGGGCGTGGGTGG | 1.59% | −17 |
| dgRNA | | | |
| CR001127- | TGCTTTTATCACAGGCTCCAGGAAGG------CCTCTGATTAGGGTGGGGGCGTGGGTGG | 1.48% | −6 |
| dgRNA | | | |
| CR001127- | TGCTTTTATCACAGGCTCCAGGA-GGGTTTGGCCTCTGATTAGGGTGGGGGCGTGGGTGG | 23.21% | −1 |
| sgRNA | | | |
| CR001127- | TGCTTTTATCACAGGCTCCAGGAAGG-TTTGGCCTCTGATTAGGGTGGGGGCGTGGGTGG | 6.65% | −1 |
| sgRNA | | | |
| CR001127- | TGCTTTTATCACAGGC-----------------CTCTGATTAGGGTGGGGGCGTGGGTGG | 5.20% | −17 |
| sgRNA | | | |
| CR001127- | TGCTTTTATCACAGGCTCCAGGAAaGGGTTTGGCCTCTGATTAGGGTGGGGGCGTGGGTGG | 4.89% | 1 |
| sgRNA | | | |
| CR001127- | TGCTTTTATCACAGGCTCCAGG----------------------------GCGTGGGTGG | 4.30% | −28 |
| sgRNA | | | |
| CR001127- | TGCTTTTATCACAGGCTCCAGG-----TTTGGCCTCTGATTAGGGTGGGGGCGTGGGTGG | 3.72% | −5 |
| sgRNA | | | |
| CR001127- | TGCTTTTATCACAGGC------------------------------------GTGGGTGG | 3.71% | −36 |
| sgRNA | | | |
| CR001127- | TGCTTTTATCACAGGCTCCAGGAAG--TTTGGCCTCTGATTAGGGTGGGGGCGTGGGTGG | 3.53% | −2 |
| sgRNA | | | |
| CR001127- | TGCTTTTATCACAGGCTCCAGGAAGGtC-----------------CGTTTGCGTGGGTGG | 2.29% | −17 |
| sgRNA | | | |
| | CACGCCCCCACCCTAATCAGagg | | |
| CR00309- | TATCACAGGCTCCAGGAAGGGTTTGGC-------------------GTGGGTGGGGTAGA | 11.56% | −19 |
| sgRNA | | | |
| CR00309- | TATCACAGGCTCCAGGAAGGGTTTGGCCTCTGAaTTAGGGTGGGGGCGTGGGTGGGGTAGA | 7.29% | 1 |
| sgRNA | | | |
| CR00309- | TATCACAGGCTCCAGGAAGGG------------------------CGTGGGTGGGGTAGA | 6.16% | −24 |
| sgRNA | | | |
| CR00309- | TATCACAGGCTCCAGGAAGGG----------------------GGCGTGGGTGGGGTAGA | 4.74% | −22 |
| sgRNA | | | |
| CR00309- | TATCACAGGCTCCAGGAAGGGTTTGG------------------GCGTGGGTGGGGTAGA | 4.34% | −18 |
| sgRNA | | | |
| CR00309- | TATCACAGGCTCCAGGAAGGGTTTGG------------------------GTGGGGTAGA | 3.45% | −24 |
| sgRNA | | | |
| CR00309- | TATCACAGGCTCCAGG---------------------------GGCGTGGGTGGGGTAGA | 1.87% | −27 |
| sgRNA | | | |
| | GAAGGGTTTGGCCTCTGATTagg | | |
| CR00313- | TCCAGGAAGGGTTTGG------------------------GTGGGGTAGAAGAGGACTGG | 3.36% | −24 |
| sgRNA | | | |
| CR00313- | TCCAGGAAGGGTTTGGCCTCTGATTAGG-TGGGGGCGTGGGTGGGGTAGAAGAGGACTGG | 3.31% | −1 |
| sgRNA | | | |
| CR00313- | TCCAGGAAGGGTT-----------------------------GGGGTAGAAGAGGACTGG | 2.83% | −29 |
| sgRNA | | | |
| CR00313- | TCCAGGAAGGGTTTGGCCT-------------------GGGTGGGGTAGAAGAGGACTGG | 2.76% | −19 |
| sgRNA | | | |
| CR00313- | TCCAGGAAGGGTTTGG------------------------------TAGAAGAGGACTGG | 2.31% | −30 |
| sgRNA | | | |
| | GTTTGGCCTCTGATTAGGGTggg | | |
| CR00312- | CCAGGAAGGGTTTGGCCTCTGATTAGG-TGGGGGCGTGGGTGGGGTAGAAGAGGACTGGC | 16.87% | −1 |
| dgRNA | | | |
| CR00312- | CCAGGAAGGGTTTGGC-------------------GTGGGTGGGGTAGAAGAGGACTGGC | 9.86% | −19 |
| dgRNA | | | |
| CR00312- | CCAGGAAGGGTTTGGCCTCTGATT--GGTGGGGGCGTGGGTGGGGTAGAAGAGGACTGGC | 5.65% | −2 |
| dgRNA | | | |
| CR00312- | CCAGGAAGGG------------------------CGTGGGTGGGGTAGAAGAGGACTGGC | 3.83% | −24 |
| dgRNA | | | |
| CR00312- | CCAGGAAGGG----------------------GGCGTGGGTGGGGTAGAAGAGGACTGGC | 3.42% | −22 |
| dgRNA | | | |
| CR00312- | CCAGGAAGGGTTTGG------------------------GTGGGGTAGAAGAGGACTGGC | 2.10% | −24 |
| dgRNA | | | |
| CR00312- | CCAGGAAGGGTTTGGCCTCTGA----GGTGGGGGCGTGGGTGGGGTAGAAGAGGACTGGC | 1.85% | −4 |
| dgRNA | | | |
| CR00312- | CCAGGAAGGGTTTGGCCTCTGATTAGG-TGGGGGCGTGGGTGGGGTAGAAGAGGACTGGC | 13.35% | −1 |
| sgRNA | | | |
| CR00312- | CCAGGAAGGGTTTGGC-------------------GTGGGTGGGGTAGAAGAGGACTGGC | 7.85% | −19 |
| sgRNA | | | |
| CR00312- | CCAGGAAGGGTTTGG------------------------GTGGGGTAGAAGAGGACTGGC | 4.19% | −24 |
| sgRNA | | | |
| CR00312- | CCAGGAAGGGTTTGGCCTCTGATT--GGTGGGGGCGTGGGTGGGGTAGAAGAGGACTGGC | 3.98% | −2 |
| sgRNA | | | |
| CR00312- | CCAGGAAGGGTTTGGCCTCTGATTAGGG-----GCGTGGGTGGGGTAGAAGAGGACTGGC | 2.95% | −5 |
| sgRNA | | | |
| CR00312- | CCAGGAAGGG------------------------CGTGGGTGGGGTAGAAGAGGACTGGC | 2.29% | −24 |
| sgRNA | | | |
| CR00312- | CCAGGAAGGGTTTGGCCTCTGATTAGaGGTGGGGGCGTGGGTGGGGTAGAAGAGGACTGGC | 2.09% | 1 |
| sgRNA | | | |
| CR00312- | CCAGGAAGGGTTTGGCCTCTGATTAGG-TGGGGGCGTGGGTGGGGTAGAAGAGGACTGGC | 19.22% | −1 |
| d1gRNA | | | |
| CR00312- | CCAGGAAGGGTTTGGCCTCTGATT--GGTGGGGGCGTGGGTGGGGTAGAAGAGGACTGGC | 6.28% | −2 |
| d1gRNA | | | |
| CR00312- | CCAGGAAGGGTTTGG------------------------GTGGGGTAGAAGAGGACTGGC | 5.31% | −24 |
| d1gRNA | | | |
| CR00312- | CCAGGAAGGGTTTGGC-------------------GTGGGTGGGGTAGAAGAGGACTGGC | 4.22% | −19 |
| d1gRNA | | | |
| CR00312- | CCAGGAAGGGTTTGG----------------GGGCGTGGGTGGGGTAGAAGAGGACTGGC | 3.10% | −16 |
| d1gRNA | | | |
| CR00312- | CCAGGAAGGGTTTGGCCTCTGATTAG--TGGGGGCGTGGGTGGGGTAGAAGAGGACTGGC | 2.85% | −2 |
| d1gRNA | | | |
| CR00312- | CCAGGAAGGG------------------------CGTGGGTGGGGTAGAAGAGGACTGGC | 2.74% | −24 |
| d1gRNA | | | |
| CR00312- | CCAGGAAGGGTTTGGCCTCTGATTAGG-TGGGGGCGTGGGTGGGGTAGAAGAGGACTGGC | 23.15% | −1 |
| d2gRNA | | | |
| CR00312- | CCAGGAAGGGTTTGGC-------------------GTGGGTGGGGTAGAAGAGGACTGGC | 8.99% | −19 |
| d2gRNA | | | |
| CR00312- | CCAGGAAGGGTTTGGCCTCTGATT--GGTGGGGGCGTGGGTGGGGTAGAAGAGGACTGGC | 6.82% | −2 |
| d2gRNA | | | |
| CR00312- | CCAGGAAGGG-----------------------GCGTGGGTGGGGTAGAAGAGGACTGGC | 2.69% | −23 |
| d2gRNA | | | |
| CR00312- | CCAGGAAGGG------------------------CGTGGGTGGGGTAGAAGAGGACTGGC | 2.29% | −24 |
| d2gRNA | | | |
| CR00312- | CCAGGAAGGGTTTGGCCTCTGATTAG--TGGGGGCGTGGGTGGGGTAGAAGAGGACTGGC | 2.25% | −2 |
| d2gRNA | | | |
| CR00312- | CCAGGAAGGGTTTGG----------------GGGCGTGGGTGGGGTAGAAGAGGACTGGC | 2.13% | −16 |
| d2gRNA | | | |
| | TTTGGCCTCTGATTAGGGTGggg | | |
| CR00311- | CAGGAAGGGTTTGGCCTCTGATTAGG-TGGGGGCGTGGGTGGGGTAGAAGAGGACTGGCA | 19.62% | −1 |
| dgRNA | | | |
| CR00311- | CAGGAAGGGTTTGGC-------------------GTGGGTGGGGTAGAAGAGGACTGGCA | 3.01% | −19 |
| dgRNA | | | |
| CR00311- | CAGGAAGGGTTTGGCCTCTGATTAG--TGGGGGCGTGGGTGGGGTAGAAGAGGACTGGCA | 2.77% | −2 |
| dgRNA | | | |
| CR00311- | CAGGAAGGGTTTGGCCTCTGATTAGGG-----GCGTGGGTGGGGTAGAAGAGGACTGGCA | 2.23% | −5 |
| dgRNA | | | |
| CR00311- | CAGGAAGGGTTTGG------------------------GTGGGGTAGAAGAGGACTGGCA | 2.21% | −24 |
| dgRNA | | | |
| CR00311- | CAGGAAGGGTTTGG-------------TGGGGGCGTGGGTGGGGTAGAAGAGGACTGGCA | 2.05% | −13 |
| dgRNA | | | |
| CR00311- | CAGGAAGGGTTTGGCCTCTG-------TGGGGGCGTGGGTGGGGTAGAAGAGGACTGGCA | 1.88% | −7 |
| dgRNA | | | |
| CR00311- | CAGGAAGGGT------------------------------GGGGTAGAAGAGGACTGGCA | 1.76% | −30 |
| dgRNA | | | |
| CR00311- | CAGGAAGGGTTTGGCCTCTGATTAGG-TGGGGGCGTGGGTGGGGTAGAAGAGGACTGGCA | 28.21% | −1 |
| sgRNA | | | |
| CR00311- | CAGGAAGGGTTTGGC-------------------GTGGGTGGGGTAGAAGAGGACTGGCA | 4.88% | −19 |
| sgRNA | | | |
| CR00311- | CAGGAAGGGT------------------------------GGGGTAGAAGAGGACTGGCA | 2.72% | −30 |
| sgRNA | | | |
| CR00311- | CAGGAAGGGTTTGGCCTCTGATTAG--TGGGGGCGTGGGTGGGGTAGAAGAGGACTGGCA | 2.62% | −2 |
| sgRNA | | | |
| CR00311- | CAGGAAGGGTTTGGCCTCTGATTAGGG----GGCGTGGGTGGGGTAGAAGAGGACTGGCA | 2.35% | −4 |
| sgRNA | | | |
| CR00311- | CAGGAAGGGTTTGGCCTCTGATTAGGG-----GCGTGGGTGGGGTAGAAGAGGACTGGCA | 2.06% | −5 |
| sgRNA | | | |
| CR00311- | CAGGAAGGGTTTGGCCTCTGATTAGG-TGGGGGCGTGGGTGGGGTAGAAGAGGACTGGCA | 31.34% | −1 |
| d1gRNA | | | |
| CR00311- | CAGGAAGGGTTTGGCCTCTGATTAG--TGGGGGCGTGGGTGGGGTAGAAGAGGACTGGCA | 4.00% | −2 |
| d1gRNA | | | |
| CR00311- | CAGGAAGGGTTTGGCCT------------------------------AAGAGGACTGGCA | 2.84% | −30 |
| d1gRNA | | | |
| CR00311- | CAGGAAGGGTTTGG-----------------------------------GAGGACTGGCA | 2.41% | −35 |
| d1gRNA | | | |
| CR00311- | CAGGAAGGGTTT---------------------------------AGAAGAGGACTGGCA | 2.35% | −33 |
| d1gRNA | | | |
| CR00311- | CAGGAAGGGTTTGGCCTC-------------------------------GAGGACTGGCA | 2.11% | −31 |
| d1gRNA | | | |
| CR00311- | CAGGAAGGGTTTGGCCTCTGATTAGGG----GGCGTGGGTGGGGTAGAAGAGGACTGGCA | 2.03% | −4 |
| d1gRNA | | | |
| CR00311- | CAGGAAGGGTTTGGCCTCTGATTAGGG---GGGCGTGGGTGGGGTAGAAGAGGACTGGCA | 1.71% | −3 |
| d1gRNA | | | |
| CR00311- | CAGGAAGGGTTTGGCCTCTGATTAGG-TGGGGGCGTGGGTGGGGTAGAAGAGGACTGGCA | 30.20% | −1 |
| d2gRNA | | | |
| CR00311- | CAGGAAGGGTTTGGC-------------------GTGGGTGGGGTAGAAGAGGACTGGCA | 7.57% | −19 |
| d2gRNA | | | |
| CR00311- | CAGGAAGGGTTTGGCCTCTGATTAG--TGGGGGCGTGGGTGGGGTAGAAGAGGACTGGCA | 3.57% | −2 |
| d2gRNA | | | |
| CR00311- | CAGGAAGGGTTTGG----------------------------GGTAGAAGAGGACTGGCA | 2.39% | −28 |
| d2gRNA | | | |
| CR00311- | CAGGAAGGGTTTGGCCTCTGATTAGGG-----GCGTGGGTGGGGTAGAAGAGGACTGGCA | 2.10% | −5 |
| d2gRNA | | | |
| CR00311- | CAGGAAGGGTTTGGCCTCTGATTAGGG----GGCGTGGGTGGGGTAGAAGAGGACTGGCA | 1.50% | −4 |
| d2gRNA | | | |
| CR00311- | CAGGAAGGGTTTGG----------------GGGCGTGGGTGGGGTAGAAGAGGACTGGCA | 1.49% | −16 |
| d2gRNA | | | |
| | TTGGCCTCTGATTAGGGTGGggg | | |
| CR00310- | AGGAAGGGTTTGGCCTCTGATTAGGG----GGCGTGGGTGGGGTAGAAGAGGACTGGCAG | 7.70% | −4 |
| sgRNA | | | |
| CR00310- | AGGAAGGGTTTGGCCTCTGATTAGGG------CGTGGGTGGGGTAGAAGAGGACTGGCAG | 7.13% | −6 |
| sgRNA | | | |
| CR00310- | AGGAAGGGTTTGGCCTCTGATTAGGG-----GCGTGGGTGGGGTAGAAGAGGACTGGCAG | 6.34% | −5 |
| sgRNA | | | |
| CR00310- | AGGAAGGGTTTGGCCTCTGATTAGG-TGGGGGCGTGGGTGGGGTAGAAGAGGACTGGCAG | 5.38% | −1 |
| sgRNA | | | |
| CR00310- | AGGAAGGGTTTGGCCTCTGATTAG--TGGGGGCGTGGGTGGGGTAGAAGAGGACTGGCAG | 3.73% | −2 |
| sgRNA | | | |
| CR00310- | AGGAAGGGTTTGGCCTCTGATT-----GGGGGCGTGGGTGGGGTAGAAGAGGACTGGCAG | 3.54% | −5 |
| sgRNA | | | |
| CR00310- | AGGAAGGGTTTGGCCTCTGATTAGGGTGGGGGCGTGGGTGGG-TAGAAGAGGACTGGCAG | 0.67% | −1 |
| dgRNA | | | |
| | TCTGATTAGGGTGGGGGCGTggg | | |
| CR00308- | GGTTTGGCCTCTGATTAGGGTGGGG------------TAGAAGAGGACTGGCAGACCTCT | 16.28% | −12 |
| sgRNA | | | |
| CR00308- | GGTTTGGCCTCTGATTAGGGTGGGGG-----------TAGAAGAGGACTGGCAGACCTCT | 5.59% | −11 |
| sgRNA | | | |
| CR00308- | GGTTTGGCCTCTGATTAGGGTGGG--------TGGGGTAGAAGAGGACTGGCAGACCTCT | 4.51% | −8 |
| sgRNA | | | |
| CR00308- | GGTTTGGCCTCTGAT------------------GGGGTAGAAGAGGACTGGCAGACCTCT | 3.54% | −18 |
| sgRNA | | | |
| CR00308- | GGTTTGGCCTCTGATTtA-----------------------------CTGGCAGACCTCT | 2.76% | −29 |
| sgRNA | | | |
| CR00308- | GGTTTGGCCTCTGATTgG-------CCGTGGGTGGGGTAGAAGAGGACTGGCAGACCTCT | 2.27% | −7 |
| sgRNA | | | |
| CR00308- | GGTTTGGCCTCTGATTAGGG----------------GTAGAAGAGGACTGGCAGACCTCT | 2.26% | −16 |
| sgRNA | | | |
| CR00308- | GGTTTGGCCTCTGATcC--AAGAGCCCGTGGGTGGGGTAGAAGAGGACTGGCAGACCTCT | 1.99% | −2 |
| sgRNA | | | |
| CR00308- | GGTTTGGCCTCTGATTAGGGTGGGGGCGTGGGTGGG-TAGAAGAGGACTGGCAGACCTCT | 0.42% | −1 |
| dgRNA | | | |
| | ATTAGGGTGGGGGCGTGGGTggg | | |
| CR001131- | TGGCCTCTGATTAGGGTGGGG------------TAGAAGAGGACTGGCAGACCTCTCCAT | 44.62% | −12 |
| dgRNA | | | |
| CR001131- | TGGCCTCTGATTAGGGTGGGGG-----------TAGAAGAGGACTGGCAGACCTCTCCAT | 3.19% | −11 |
| dgRNA | | | |
| CR001131- | TGGCCTCTGATTAGGGTGGGGGCGTGG-TGGGGTAGAAGAGGACTGGCAGACCTCTCCAT | 1.72% | −1 |
| dgRNA | | | |
| CR001131- | TGGCCTCTGATTAGGGTGGGGGCG------------AAGAGGACTGGCAGACCTCTCCAT | 1.04% | −12 |
| dgRNA | | | |
| | TTAGGGTGGGGGCGTGGGTGggg | | |
| CR001124- | GGCCTCTGATTAGGGTGGGG------------TAGAAGAGGACTGGCAGACCTCTCCATC | 8.52% | −12 |
| dgRNA | | | |
| CR001124- | GGCCTCTGATTAGGGTGGGGGCGTGG-TGGGGTAGAAGAGGACTGGCAGACCTCTCCATC | 2.12% | −1 |
| dgRNA | | | |
| CR001124- | GGCCTCTGATTAGGGTGGGGG-----------TAGAAGAGGACTGGCAGACCTCTCCATC | 1.33% | −11 |
| dgRNA | | | |
| | TGTAACTAATAAATACCagg | | |
| CR00260- | CTGCTGAGGTGTAACTAATAAATACC-GGAGGCAGCATTTTAGTTCACAAGCTCGGAGCA | 26.54% | −1 |
| dgRNA | | | |
| CR00260- | CTGCTGAGGTGTAACTAATAAATAC-AGGAGGCAGCATTTTAGTTCACAAGCTCGGAGCA | 12.39% | −1 |
| dgRNA | | | |
| CR00260- | CTGCTGAGGTGTAACTAATAAATACCcAGGAGGCAGCATTTTAGTTCACAAGCTCGGAGCA | 12.32% | 1 |
| dgRNA | | | |
| CR00260- | CTGCTGAGGTGTAACTAATAAATACC--GAGGCAGCATTTTAGTTCACAAGCTCGGAGCA | 2.37% | −2 |
| dgRNA | | | |
| CR00260- | CTGCTGAGGTGTAACTAATAAAT--CAGGAGGCAGCATTTTAGTTCACAAGCTCGGAGCA | 1.89% | −2 |
| dgRNA | | | |
| CR00260- | CTGCTGAGGTGTAACTAATAAATA---GGAGGCAGCATTTTAGTTCACAAGCTCGGAGCA | 1.28% | −3 |
| dgRNA | | | |
| | CAGTGAGATGAGATATCAAAggg | | |
| CR00246- | GGGAGATGGAATGAACACTTTTCGTCCCCTTTGgATATCTCATCTCACTGAGCTCTGGGCC | 7.56% | 1 |
| dgRNA | | | |
| CR00246- | GGGAGATGGAATGAACACTTTTCGTCCCCTTTGAT--CTCATCTCACTGAGCTCTGGGCC | 4.46% | −2 |
| dgRNA | | | |
| CR00246- | GGGAGATGGAATGAACACTTTTCGTCCCCTTTG------CATCTCACTGAGCTCTGGGCC | 3.50% | −6 |
| dgRNA | | | |
| CR00246- | GGGAGATGGAATGAACACTTTTCGTCCCCTTT-----CTCATCTCACTGAGCTCTGGGCC | 2.98% | −5 |
| dgRNA | | | |
| CR00246- | GGGAGATGGAATGAACACTTTTCGTCCCCTTT-ATATCTCATCTCACTGAGCTCTGGGCC | 2.97% | −1 |
| dgRNA | | | |
| CR00246- | GGGAGATGGAATGAACACTTTTCGTCCCCTTTG---TCTCATCTCACTGAGCTCTGGGCC | 2.96% | −3 |
| dgRNA | | | |
| CR00246- | GGGAGATGGAATGAACACTTTTCGTCCCCTTT--TATCTCATCTCACTGAGCTCTGGGCC | 2.93% | −2 |
| dgRNA | | | |
| CR00246- | GGGAGATGGAATGAACACTTTTCGTCCCCTTTG-TATCTCATCTCACTGAGCTCTGGGCC | 2.70% | −1 |
| dgRNA | | | |
| | TCAGTGAGATGAGATATCAAagg | | |
| CR00245- | GGAGATGGAATGAACACTTTTCGTCCCCTTTGAaTATCTCATCTCACTGAGCTCTGGGCCG | 22.36% | 1 |
| dgRNA | | | |
| CR00245- | GGAGATGGAATGAACACTTTTCGTCCCCTTTGA-ATCTCATCTCACTGAGCTCTGGGCCG | 8.97% | −1 |
| dgRNA | | | |
| CR00245- | GGAGATGGAATGAACACTTTTCGTCCCCTTTGAT--CTCATCTCACTGAGCTCTGGGCCG | 4.03% | −2 |
| dgRNA | | | |
| CR00245- | GGAGATGGAATGAACACTTTTCGTCCCCTTTG-TATCTCATCTCACTGAGCTCTGGGCCG | 2.45% | −1 |
| dgRNA | | | |
| CR00245- | GGAGATGGAATGAACACTTTTCGTCCCCTT--ATATCTCATCTCACTGAGCTCTGGGCCG | 1.85% | −2 |
| dgRNA | | | |
| CR00245- | GGAGATGGAATGAACACTTTTCGTCCCCTTTGA-----CATCTCACTGAGCTCTGGGCCG | 1.38% | −5 |
| dgRNA | | | |
| | GTGCCAGATGAACTTCCCATtgg | | |
| g7BCL11a-BC- | CTGTGGGCAGTGCCAGATGAACTTCC-ATTGGGGGACATTCTTATTTTTATCGAGCACAA | 15.63% | −1 |
| 1sgRNA | | | |
| g7BCL11a-BC- | CTGTGGGCAGTGCCAGATGAACTTC--ATTGGGGGACATTCTTATTTTTATCGAGCACAA | 7.36% | −2 |
| 1sgRNA | | | |
| g7BCL11a-BC- | CTGTGGGCAGTGCCAGATGAACTTCCCcATTGGGGGACATTCTTATTTTTATCGAGCACAA | 6.88% | 1 |
| 1sgRNA | | | |
| g7BCL11a-BC- | CTGTGGGCAGTGCCAGATGAAC-----ATTGGGGGACATTCTTATTTTTATCGAGCACAA | 2.81% | −5 |
| 1sgRNA | | | |
| g7BCL11a-BC- | CTGTGGGCAGTGCCAGATGAACTTCC--TTGGGGGACATTCTTATTTTTATCGAGCACAA | 2.59% | −2 |
| 1sgRNA | | | |
| g7BCL11a-BC- | CTGTGGGCAGTGCCAGATGAACTTCC-ATTGGGGGACATTCTTATTTTTATCGAGCACAA | 18.89% | −1 |
| 2sgRNA | | | |
| g7BCL11a-BC- | CTGTGGGCAGTGCCAGATGAACTTC--ATTGGGGGACATTCTTATTTTTATCGAGCACAA | 9.14% | −2 |
| 2sgRNA | | | |
| g7BCL11a-BC- | CTGTGGGCAGTGCCAGATGAACTTCCCcATTGGGGGACATTCTTATTTTTATCGAGCACAA | 5.52% | 1 |
| 2sgRNA | | | |
| g7BCL11a-BC- | CTGTGGGCAGTGCCAGATGAACTTCC--TTGGGGGACATTCTTATTTTTATCGAGCACAA | 4.39% | −2 |
| 2sgRNA | | | |
| g7BCL11a-BC- | CTGTGGGCAGTGCCAGATGAACT---CATTGGGGGACATTCTTATTTTTATCGAGCACAA | 3.18% | −3 |
| 2sgRNA | | | |

[0926] To determine whether CD34+ HSPC have retained their multilineage potential to differentiate into effector cells after ex vivo manipulations including genome editing, in vitro colony forming cell (CFC) unit assays were performed for select gRNAs. The genome edited cells were suspended in cytokine-supplemented methylcellulose and maintained for 14 days at 37° C. in a humidified atmosphere of 5% CO2. Discrete colonies developed which were classified and counted based on the number and types of mature cells using morphological and phenotypic criteria (STEMvision) that they contain and scored for contribution to colony forming unit-erythroid (CFU-E), burst forming unit-erythroid (BFU-E), colony-forming unit-granulocyte/macrophage (CFU-GM) and colony-forming unit-granulocyte/erythrocyte/macrophage/megakaryocyte (CFU-GEMM; FIG. 21). The colony forming potential of mock transfected cells was the highest followed by gRNAs targeting +58 erythroid enhancer of BCL11A. A similar number and types of colonies were observed for gRNAs targeting BCL11A erythroid enhancer. The guide RNA targeting exon 2 of BCL11A gave the least number of colonies (FIG. 22).

[0927] Relative mRNA expression levels of BCL11A, gamma- and beta-globin chains in unilineage erythroid cultures were quantified by Real-Time PCR. The transcript levels were normalized against human GAPDH transcript levels. The BCL11A mRNA levels were reduced in genome edited HSPC. In contrast, BCL11A mRNA levels remained the same in unedited or edited HSPC at the exon 2 of BCL11A on days 7 and 14 of erythroid differentiation (FIG. 23). Gamma globin mRNA levels increased and correspondingly beta-globin mRNA decreased gradually in edited HSPC during erythroid differentiation (FIG. 23). Increase in HbF and decrease in beta-globin (sickled globin) levels in erythrocytes derived from genome edited cells likely to have therapeutic implications by reduced sickling.

[0928] The genome edited and unedited HSPC at various stages (day 7, 14 and 21) of erythroid differentiation were analyzed by flow cytometry for expression levels of fetal globin and two erythroid cell surface markers, transferrin receptor (CD71) and glycophorin A (CD235a) using antibodies conjugated to fluorescent dyes. The live cells were identified and gated by exclusion of 7AAD. Genome editing did not adversely affect erythroid differentiation as the cultured cells showed similar levels of CD71 and CD235A positivity consistent with late stage erythroblasts. Genome editing of +58 erythroid enhancer region resulted in a larger increase in HbF containing cells (up to 67%) than other gRNAs and the mock electroporated cells (FIG. 24). Very high induction of HbF positive cells by g7 gRNA targeting exon 2 of BCL11A was observed. However, the cell proliferation and colony forming potential of exon 2 targeted cells was dramatically reduced (FIGS. 21 and 22).

[0929] Upon deep sequencing of the targeted region, we noticed that GATA1 and TAL1 binding motifs were intact in the genome edited target region (FIG. 25). Recent literature demonstrated the importance of GATA1 binding site in regulation of BCL11A expression and derepression of fetal globin. Viestra et al., Nature Methods. 2015, 12:927. In contrast to the literature reports, which showed the importance of the two motifs for maintenance of BCL11A levels in adult erythroid cells, our findings demonstrate that sequences upstream of the two transcription factor binding sites are also important in regulation of BCL11a gene expression, and genome editing exclusively at these upstream sites leads to upregulation of HbF, even when the GATA1 and TAL1 binding sites remain intact.

### Example 3.1

[0930] Methods:

[0931] Human CD34⁺ cell culture. Human CD34+ cells were isolated from G-CSF mobilized peripheral blood from adult donors (AllCells) using immunoselection (Miltenyi) according to the manufacturer's instructions and expanded for 3 days using StemSpan SFEM (StemCell Technologies; Cat no. 09650) supplemented with 50 ng/mL each of thrombopoietin (Tpo), Flt3 ligand (Flt-3L, Life Technologies, Cat. #PHC9413), human stem cell factor (SCF, Life Technologies, Cat. #PHC2113) and human interleukin-6 (IL-6, Life Technologies, Cat. #PHC0063), as well as 1× antibiotic/antimycotic (Gibco, Cat. #10378-016) and 500 nM compound 4.

[0932] Assembly of Cas9 and guide RNA ribonucleoprotein (RNP) complexes, preparation of HSPC, and electroporation of RNP into HSPC. Cas9-guide RNA ribonucleoprotein complexes (RNPs) were prepared immediately prior to electroporation. For formation of RNP using dual guide RNAs (dgRNAs), 3 μg of each of crRNA (in 2.24 μL) and tracr (in 1.25 μL) are first denatured at 95° C. for 2 min in separate tubes and then cooled to room temperature. For preparation of Cas9 protein, 6 μg of CAS9 protein (in 1 μL) was mixed with 0.5 μL of 5×CCE buffer (20 mM HEPES, 100 mM KCL, 5 mM MgCL2, 5% Glycerol and freshly added 1 mM DTT). Tracr was first mixed with the Cas9 preparation and incubated at 37° C. for 5 min. The crRNA was then added to Tracr/CAS9 complexes and incubated for 5 min at 37° C. For the None/control condition, vehicle rather than crRNA was added to the Tracr/CAS9 complexes. The HSPC were collected by centrifugation and resuspended in P3 Primary Cell Solution (Lonza cat. No. PBP3-00675) at a cell density of 2.5×10⁶/mL. The RNP was mixed with 20 μL of cells by pipetting up and down and incubated at RT for 2 min. The RNP/cell mixture (20 μL) was electroporated using code CM-137 on the 4D-Nucleofector (Lonza). Duplicate 20 μL electroporations were performed. For the experiments in this Example 3.1, the tracr used was SEQ ID NO: 7808, and the crRNA had the following format and sequence, with 2′O-Methyl (m) and Phosphorothioate Bond (*) modifications indicated: mN*mN*mN*rNrNrNrNrNrNrNrNrNrNrNrNrNrNrNrNrNrGrUrUrUrUrArGrArGrCrUrArU*mG*mC*mU (SEQ ID NO: 7832), where N's are the nucleotides of the indicated targeting domain (e.g., as indicated by the CRxxxxx identifier).

[0933] In vitro erythropoiesis and FACS analysis for HbF containing erythroid cells. After electroporation, the cells were immediately transferred into 250 μL pre-warmed erythroid differentiation medium (EDM) consisting of IMDM (Hyclone, Cat. #SH30228.01), 330 μg/mL human holo-transferrin (Invitria Cat #777TRF029), 10 μg/mL recombinant human insulin (Gibco Cat #A1138211), 2 IU/mL heparin (Sigma, part #H3393), 5% human AB serum (Sigma, Cat #H4522), 125 ng/mL human erythropoietin (Peprotech #10779-058), and 1× antibiotic/antimycotic (Gibco, Cat. #10378-016). EDM was further supplemented with 1 μM hydrocortisone (Sigma H8672), 100 ng/mL human SCF (Life Technologies, Cat. #PHC2113), and 5 ng/mL human IL-3 (Peprotech #10779-598). After 2 days, the cell culture was diluted in fresh medium. Cultures were maintained for a total of 7 days, at which time the cells were analyzed by intracellular staining for HbF expression. Briefly, the cells were washed once with PBS, resuspended in LIVE/DEAD® Fixable Violet Dead Cell Stain (ThermoFisher L34963; 1:1000 in PBS) and incubated for 30 min. Cell were then washed and stained with anti-CD71-BV711 (Fisher Scientific Company Llc. BDB563767) and anti-CD235a-APC (BD 551336) antibodies for 30 min. The cells were then washed, followed by fixation with fixation buffer (Biolegend, Cat #420801) and permeabilized with 1× intracellular staining permeabilization wash buffer (Biolegend, Cat #421002) according to the manufacturer's instructions. The cells were then incubated with 0.5 μL of anti-HbF-PE antibody (Life Technologies, part #MHFH04) in 50 μL of 1× intracellular staining perm wash buffer for 20 min at room temperature. The cells were washed twice with 2 mL of 1× intracellular staining Perm wash buffer and resuspend in staining buffer and analyzed on an LSRFortessa flow cytometer (BD Biosciences) for HbF expression. The results were analyzed using Flowjo and data were presented as % of HbF positive cells (F-cells) in the viable CD71 positive erythroid cell population.

[0934] Genomic DNA preparation and next generation sequencing (NGS). Genomic DNA was prepared from edited and unedited HSPC at 48 hours post-electroporation using Quick Extract DNA Extraction Solution (Epicentre Cat #QE09050). To determine editing efficiency and patterns of insertions and deletions (indels), PCR products were generated using primers flanking the target sites, which were then subjected to next generation sequencing (NGS). Percent editing of corresponding sequences in unedited samples was typically less than 1% and never exceeded 3%.

[0935] Results:

[0936] Without being bound by theory, it is believed that targeted genetic disruption of the BCL11A erythroid enhancer region will relieve repression of γ-globin expression, allowing production of the red blood cells containing elevated HbF protein, (cells expressing fetal hemoglobin, e.g., expressing elevated levels of fetal hemoglobin, are sometimes referred to herein as “F-cells.” In embodiments, a cell is considered an F-cell if it produces as least 6 picograms fetal hemoglobin per cell). The elevated HbF prevents sickling of the red blood cells under deoxygenated conditions and will be therapeutic/curative for the patients of both β-thalassemia and SCD. Autologous hematopoietic stem cell transplantation (HSCT) with ex vivo genome edited HSC from SCD patients was also combined with stem cell expansion enhancing technology, e.g., an aryl hydrocarbon receptor (AHR) inhibitor, e.g., as described in WO2010/059401 (the contents of which are incorporated by reference in their entirety), e.g., Compound 4, to improve ex vivo expansion and increase the dose of gene modified HSC delivered.

[0937] For efficient genome editing via programmable nuclease, Cas9, the successful delivery of guide RNA (gRNA) and Cas9 protein into target cells and tissues is essential. Recent reports demonstrated that Cas9 ribonucleoprotein (RNP) complexes when delivered into target cells by electroporation can accomplish efficient and specific genome editing in several different cell types. Cas9-RNP complexes cleave chromosomal DNA almost immediately after delivery and are degraded rapidly in cells, reducing off-target effects. In contrast, use of plasmid and viral vector systems used to deliver Cas9 results in prolonged expression of the enzyme aggravating off-target effects associated with the system. Additionally, delivery of RNPs into the target cells requires no additional tools which would greatly facilitate translation of genome editing for therapeutic purposes in the clinic. Purified recombinant Cas9 protein and gRNA complexes (RNPs) were delivered into cultured HSPC and an overview experiments used are shown in FIG. 17.

[0938] Recombinant Cas9 protein was purified from Escherichia coli and complexed with synthetic dual gRNAs (dgRNA) that consist of crRNA and tracr to generate ribonucleoprotein (RNP) complexes. The list and of gRNAs used in the study are shown in Table 17 (e.g., gRNAs comprising the targeting domain of the indicated CRxxxxxx identifier). The RNP complexes were electroporated into CD34+ HSPC via electroporation as described under materials and methods. The cells were expanded prior to the delivery of RNP complexes. Actively dividing cells may facilitate uptake of RNP complexes delivered by electroporation.

TABLE 17
List of gRNAs targeting the BCL11A erythroid specific enhancer region
used in the current study. All gRNA molecules were tested in duplicate
in the dgRNA format as described in the materials and methods.

| | % HbF+ (F | % HbF+ (F | | |
|---|---|---|---|---|
| Guide RNA | cells), | cells), | % edited, | % edited, |
| targeting domain | average of | standard | average of | standard |
| ID | replicates | deviation | replicates | deviation |
| CR000308 | 27.7 | 0.5 | 52.8 | 0.7 |
| CR000309 | 43.1 | 1.4 | 74.8 | 7.5 |
| CR000310 | 28.6 | 0.1 | 65.1 | 3.6 |
| CR000311 | 27.2 | 0.7 | 50.5 | 1.9 |
| CR000312 | 47.9 | 1.0 | 87.8 | 0.9 |
| CR000313 | 36.8 | 1.2 | 66.6 | 2.7 |
| CR000314 | 32.7 | 0.1 | 39.8 | 0.5 |
| CR000316_EH11 | 34.4 | 0.8 | 52.9 | 1.3 |
| CR000317_EH4 | 50.7 | 0.4 | 82.7 | 2.5 |
| CR001124 | 28.6 | 0.1 | 2.5 | 0.1 |
| CR001125_EH12 | 42.3 | 0.4 | 94.0 | 0.9 |
| CR001126_EH13 | 44.6 | 1.7 | 76.7 | 6.1 |
| CR001127_EH14 | 33.3 | 0.1 | 26.1 | 3.3 |
| CR001128_EH15 | 46.4 | 1.2 | 84.6 | 5.6 |
| CR001129 | 25.3 | 0.8 | 3.6 | 0.4 |
| CR001130 | 27.1 | 0.8 | 11.8 | 1.7 |
| CR001131 | 28.6 | 0.0 | 35.6 | 8.5 |
| None/control | 22.4 | 0.6 | n/a | n/a |
| g8 | 66.3 | 0.7 | 94.2 | 1.1 |

[0939] The genome edited and unedited HSPC were analyzed by flow cytometry for expression levels of fetal globin and two erythroid cell surface markers, transferrin receptor (CD71) and glycophorin A (CD235a) using antibodies conjugated to fluorescent dyes. The live cells were identified and gated by exclusion of Live Dead Violet. BCL11A erythroid specific enhancer region targeting resulted in increased percentage of erythroid cells containing HbF (up to 50.7%) compared to mock electroporated cells (22.4%) (Table 17). Induction of HbF positive cells by dgRNA including the targeting domain of g8 targeting exon 2 of BCL11A was also observed in parallel. Genomic PCR products of the BCL11A erythroid enhancer region were also subjected to next generation sequencing (NGS) to determine the percentage of edited alleles in the cell population. The dgRNA treatments that resulted in greater than 40% HbF+ cells had a range of 74.8% to 94.0% editing (Table 17). For the same targeting domain, the dgRNA in this Example differed in tracr and crRNA sequence from that in Example 3; however, the editing and HbF induction were similar across dgRNA formats for most targeting domains. Of note, CR000317_EH4 in the dgRNA format in the current study resulted in a high HbF induction to 50.7% HbF+ cells. An increase in HbF-containing erythrocytes derived from genome edited cells is likely to have positive therapeutic implications by reduced sickling.

### Example 3.2. Optimization of gRNA Editing and Fetal Hemoglobin Upregulation Using gRNAs Targeting the +58 Region of the BCL11a Enhancer in HSPCs

[0940] Based on the % editing results from the comprehensive screen of gRNAs targeting the +58 region of the BCL11a Enhancer, 8 gRNA targeting domains were selected for further study and optimization. To test the effect of modifications to the gRNA molecules on % editing, erythroid differentiation, and fetal hemoglobin expression, different versions of the eight gRNA molecules targeting sites within the +58 region of the BCL11a enhancer region were designed. The following versions of of gRNAs comprising the targeting domain of CR00309, CR00311, CR00312, CR00316, CR01125, CR01126, CR01127, and CR01128 were made:

[0941] dgRNA (all sequences other than those of the targeting domain as described in Example 1):
[0942] 1. Unmodified crRNA and unmodified tracr (“Unmodified” or “Unmod”)
[0943] 2. Unmodified crRNA and unmodified tracr, but with only the 5′-18 nt of the indicated targeting domain (not the full 20 nt) (“18 nt”)
[0944] 3. Three 3′ nt and three 5′ nt of crRNA modified with phosphorothioate linkages, and unmodified tracr (“PS”)
[0945] 4. Additional inverted abasic residue at both 5′- and 3′-end of crRNA, and unmodified tracr (“Invd”)
[0946] 5. Three 3′ nt and three 5′ nt of crRNA modified with phosphorothioate linkages and with 2′-Omethyl groups, and unmodified tracr (“OMePS”)
[0947] 6. Three 3′ nt and three 5′ nt of crRNA modified with 2′-fluoro group, and unmodified tracr (“F”)
[0948] 7. Three 3′ nt and three 5′ nt of crRNA modified with phosphorothioate linkages and with 2′-fluoro group, and unmodified tracr (“F-PS”)

[0949] sgRNA (all sequences other than targeting domain are as described in Example 1):
[0950] 1. Unmodified sgRNA (“Unmodified” or “Unmod”)
[0951] 2. Targeting domain consisting of only the 5′-18 nt of the indicated targeting domain (not the full 20 nt) (“18 nt”)
[0952] 3. Three 3′ nt and three 5′ nt of sgRNA modified with phosphorothioate linkages (“PS”)
[0953] 4. Additional inverted abasic residue at both 5′- and 3′-end of sgRNA (“Invd”)
[0954] 5. Three 3′ nt and three 5′ nt of sgRNA modified with phosphorothioate linkages and with 2′-Omethyl groups (“OMePS”)
[0955] 6. Three 3′ nt and three 5′ nt of sgRNA modified with 2′-fluoro group (“F”)
[0956] 7. Three 3′ nt and three 5′ nt of sgRNA modified with phosphorothioate linkages and with 2′-fluoro group (“F-PS”)

[0957] All other reagents and methods were as described in Example 3. All results were run in duplicate, and the results are reported in FIGS. 28-32. FIG. 28A and FIG. 28B show the % editing, as measured by NGS, in CD34+ cells 2 days after electroporation of RNP comprising the indicated dual guide RNAs (dgRNAs). FIG. 29 shows the % editing, as measured by NGS, in CD34+ cells 2 days after electroporation of RNP comprising the indicated single guide RNAs (sgRNAs). FIG. 30 shows the % HbF positive cells as measured by flow cytometry at day 14 following transfer of edited CD34+ cells to erythroid differentiation medium, after electroporation of RNP comprising the indicated dual guide RNAs (dgRNAs). FIG. 31 shows the % HbF positive cells as measured by flow cytometry at day 14 following transfer of edited CD34+ cells to erythroid differentiation medium, after electroporation of RNP comprising the indicated single guide RNAs (sgRNAs). FIG. 32 shows the fold-expansion of edited cells after 14 days in the erythroid differentiation medium. These results indicate that many of the selected gRNA molecules, in both dgRNA and sgRNA formats, are capable of achieving genome editing at the target site with greater than 90% efficiency, and in some cases, with greater than 98% efficiency, when delivered to CD34+ cells as RNP via electroporation. As well, many of the selected gRNAs were able to achieve a greater than 20% increase in % F cells relative to unmodified cells (“mock”). Finally, although genome editing of BCL11A erythroid enhancer in HSPC lowered the expansion capabilities of erythroid cells, with the effect more pronounced with some gRNAs (e.g., CR00309) than other gRNAs (e.g., CR00312), most edited cell populations differentiated into erythrocytes were non-the-less capable of achieving between 500-1500 population doublings in 14 days in erythroid differentiation medium ex vivo, indicating that the edited cells may be therapeutically useful in treating hemoglobinopathies such as sickle cell disease or beta thalassemia in patients.

### Example 4. HPFH Region Editing in Hematopoietic Stem and Progenitor Cells (HSPCs) Using CRISPR-Cas9 for Derepression of Fetal Globin Expression in Adult Erythroid Cells

[0958] Methods:

[0959] Human CD34⁺ cell culture. Human CD34+ cells were isolated from G-CSF mobilized peripheral blood from adult donors (AllCells) using immunoselection (Miltenyi) according to the manufacturer's instructions and expanded for 4 to 6 days using StemSpan SFEM (StemCell Technologies; Cat no. 09650) supplemented with 50 ng/mL each of thrombopoietin (Tpo), Flt3 ligand (Flt-3L, Life Technologies, Cat. #PHC9413), human stem cell factor (SCF, Life Technologies, Cat. #PHC2113) and human interleukin-6 (IL-6, Life Technologies, Cat. #PHC0063), as well as 1× antibiotic/antimycotic (Gibco, Cat. #10378-016) and 500 nM compound 4. Throughout this example (including its subexamples), where the protocol indicates that cells were “expanded,” this medium was used. This medium is also referred to as “stem cell expansion medium,” or “expansion medium” throughout this example (including its subexamples).

[0960] Assembly of Cas9 and guide RNA ribonucleoprotein (RNP) complexes, preparation of HSPC, and electroporation of RNP into HSPC. Cas9-guide RNA ribonucleoprotein complexes (RNPs) were prepared immediately prior to electroporation. For formation of RNP using dual guide RNAs (dgRNAs), 3 μg of each of crRNA (in 2.24 μL) and tracr (in 1.25 μL) are first denatured at 95° C. for 2 min in separate tubes and then cooled to room temperature. For preparation of Cas9 protein, 6 μg of CAS9 protein (in 0.8 to 1 μL) was mixed with 0.5 μL of 5×CCE buffer (20 mM HEPES, 100 mM KCL, 5 mM MgCL2, 5% Glycerol and freshly added 1 mM DTT). Tracr was first mixed with the Cas9 preparation and incubated at 37° C. for 5 min. The crRNA was then added to Tracr/CAS9 complexes and incubated for 5 min at 37° C. For the None/control condition, vehicle rather than crRNA was added to the Tracr/CAS9 complexes. The HSPC were collected by centrifugation and resuspended in T buffer that comes with Neon electroporation kit (Invitrogen; Cat #: MPK1096) at a cell density of 5×10⁶/mL. The RNP was mixed with 20 μL of cells by pipetting up and down and incubated at RT for 2 min. The RNP/cell mixture (10 μL) was transferred into Neon electroporation probe. The electroporation was performed with Neon transfection system (Invitrogen; MPK5000S) using 1700 volts/20 milliseconds and 1 pulse. Duplicate 10 μL electroporations were performed.

[0961] In vitro erythropoiesis and FACS analysis for HbF containing erythroid cells. After electroporation, the cells were immediately transferred into 250 μL pre-warmed erythroid differentiation medium (EDM) consisting of IMDM (Hyclone, Cat. #SH30228.01), 330 μg/mL human holo-transferrin (Invitria Cat #777TRF029), 10 μg/mL recombinant human insulin (Gibco Cat #A1138211), 2 IU/mL heparin (Sigma, part #H3393), 5% human AB serum (Sigma, Cat #H4522), 125 ng/mL human erythropoietin (Peprotech #10779-058), and 1× antibiotic/antimycotic (Gibco, Cat. #10378-016). EDM was further supplemented with 1 μM hydrocortisone (Sigma H8672), 100 ng/mL human SCF (Life Technologies, Cat. #PHC2113), and 5 ng/mL human IL-3 (Peprotech #10779-598). After 2 days, the cell culture was diluted in fresh medium. Cultures were maintained for a total of 7 days, at which time the cells were analyzed by intracellular staining for HbF expression. Briefly, the cells were washed once with PBS, resuspended in LIVE/DEAD® Fixable Violet Dead Cell Stain (ThermoFisher L34963; 1:1000 in PBS) and incubated for 30 min. Cell were then washed and stained with anti-CD71-BV711 (Fisher Scientific Company Llc. BDB563767) and anti-CD235a-APC (BD 551336) antibodies for 30 min. The cells were then washed, followed by fixation with fixation buffer (Biolegend, Cat #420801) and permeabilized with 1× intracellular staining permeabilization wash buffer (Biolegend, Cat #421002) according to the manufacturers instructions. The cells were then incubated with 0.5 μL of anti-HbF-PE antibody (Life Technologies, part #MHFH04) in 50 μL of 1× intracellular staining perm wash buffer for 20 min at room temperature. The cells were washed twice with 2 mL of 1× intracellular staining Perm wash buffer and resuspend in staining buffer and analyzed on an LSRFortessa flow cytometer (BD Biosciences) for HbF expression. The results were analyzed using Flowjo and data were presented as % of HbF positive cells (F-cells) in the viable CD71 positive erythroid cell population.

[0962] Gene expression analysis. After 7 days of in vitro erythropoiesis as described, approximately 1×10⁵ cells were used to purify RNA using the Zymo Research ZR-96 quick RNA Kit (Zymo Cat #R1053). Up to 1 μg RNA was used for 1st strand synthesis using Quantiscript Reverse Transcription Kit (Qiagen, Cat #205313). Taq-man quantitative real-time PCR was performed using the 2× Taq-Man Fast Advance PR Mix (Life technologies, Cat #4444963) and Taq-Man Gene Expression Assays for GAPDH (Life technologies, ID #Hs02758991_g1, VIC), HBB (Life technologies, ID #Hs00747223_g1, VIC) and HBG2/HBG1 (Life technologies, ID #Hs00361131_g1, FAM), according to the suppliers protocol. The relative expression of each gene was normalized to GAPDH expression and reported as fold of None/control RNP-delivered samples by the ΔΔCt method. Alternatively, after conversion to a GAPDH normalized relative quantity of transcript (2\hat{ }−ΔCt), the HBG2/HBG1 expression level was calculated as a percentage of the sum of HBB and HBG2/HBG1 expression.

[0963] Genomic DNA preparation and next generation sequencing (NGS). Genomic DNA was prepared from edited and unedited HSPC at 48 hours post-electroporation using Quick Extract DNA Extraction Solution (Epicentre Cat #QE09050). To determine editing efficiency and patterns of insertions and deletions (indels), PCR products were generated using primers flanking the target sites, which were then subjected to next generation sequencing (NGS) as described in the literature. Percent editing of corresponding sequences in unedited samples (electroporated with RNPs consisting of Cas9 and Tracr only) was typically less than 1% and never exceeded 3%.

[0964] Results:

[0965] Without being bound by theory, it is believed that targeted genetic disruption of the HPFH region will relieve repression of γ-globin expression, allowing production of the red blood cells containing elevated HbF protein, (cells expressing fetal hemoglobin are sometimes referred to herein as “F-cells”). The elevated HbF prevents sickling of the red blood cells under deoxygenated conditions and will be therapeutic/curative for the patients of both β-thalassemia and SCD. Autologous hematopoietic stem cell transplantation (HSCT) with ex vivo genome edited HSC from SCD patients was also combined with stem cell expansion enhancing technology, e.g., an aryl hydrocarbon receptor (AHR) inhibitor, e.g., as described in WO2010/059401 (the contents of which are incorporated by reference in their entirety), e.g., Compound 4 to improve ex vivo expansion and increase the dose of gene modified HSC delivered.

[0966] For efficient genome editing via programmable nuclease, Cas9, the successful delivery of guide RNA (gRNA) and Cas9 protein into target cells and tissues is essential. Recent reports demonstrated that Cas9 ribonucleoprotein (RNP) complexes when delivered into target cells by electroporation can accomplish efficient and specific genome editing in several different cell types. Cas9-RNP complexes cleave chromosomal DNA almost immediately after delivery and are degraded rapidly in cells, reducing off-target effects. In contrast, use of plasmid and viral vector systems used to deliver Cas9 results in prolonged expression of the enzyme aggravating off-target effects associated with the system. Additionally, delivery of RNPs into the target cells requires no additional tools which would greatly facilitate translation of genome editing for therapeutic purposes in the clinic. Purified recombinant Cas9 protein and gRNA complexes (RNPs) were delivered into cultured HSPC and an overview experiments used are shown in FIG. 17.

[0967] Recombinant Cas9 protein was purified from Escherichia coli and complexed with synthetic dual gRNAs (dgRNA) that consist of crRNA and tracr to generate ribonucleoprotein (RNP) complexes. The list and sequences of gRNAs used in the study are shown in Table 16. The RNP complexes were electroporated into CD34+ HSPC via electroporation as described under materials and methods. The cells were expanded prior to the delivery of RNP complexes. Actively dividing cells may facilitate uptake of RNP complexes delivered by electroporation.

TABLE 16
List of gRNAs targeting the HPFH region used in the current study. All gRNA
molecules were tested in duplicate in the dgRNA format described above,
except for g8 (crRNA consisting of mN*mN*mN*rNrNrNrNrNrNrNrNrNrNr-
NrNrNrNrNrNrNrGrUrUrUrUrArGrArGrCrUrArU*mG*mC*mU
(SEQ ID NO: 7832), where N's are
the residues of the targeting domain, and modifications are indicated
as follows: 2′O-Methyl (m) and Phosphorothioate Bond (*); with the
tracr sequence SEQ ID NO: 7808) and None/control. The g8 and None/
control were tested in 16 replicates each.

| | % HbF+ (F | % HbF+ (F | | | | |
|---|---|---|---|---|---|---|
| Guide RNA | cells), | cells), | % CD71+, | % CD71+, | % edited, | % edited, |
| targeting | average of | standard | average of | standard | average of | standard |
| domain ID | replicates | deviation | replicates | deviation | replicates | deviation |
| CR001030 | 51.4 | 5.2 | 84.4 | 0.6 | 84.5 | 1.6 |
| CR001095 | 49.3 | 1.8 | 82.7 | 2.5 | 66.1 | 1.4 |
| CR001043 | 44.8 | 2.0 | 84.1 | 0.8 | 80.0 | 0.7 |
| CR001029 | 43.7 | 1.3 | 82.2 | 0.7 | 86.6 | 2.7 |
| CR001142 | 43.4 | 0.6 | 83.9 | 0.1 | 76.9 | 0.4 |
| CR001028 | 42.9 | 1.3 | 84.8 | 0.5 | 91.7 | 0.5 |
| CR001212 | 42.6 | 5.8 | 83.1 | 0.9 | 81.6 | 1.5 |
| CR001036 | 42.4 | 1.3 | 82.6 | 0.6 | 91.5 | 5.0 |
| CR001135 | 42.4 | 0.7 | 83.7 | 0.1 | 84.4 | 13.3 |
| CR001221 | 41.8 | 1.7 | 80.8 | 0.4 | 83.9 | 1.4 |
| CR001158 | 41.7 | 1.3 | 81.7 | 0.2 | 72.4 | 2.7 |
| CR001090 | 41.3 | 0.1 | 85.5 | 0.8 | 87.2 | 1.2 |
| CR001169 | 41.3 | 1.5 | 82.4 | 2.6 | 80.2 | 2.5 |
| CR001089 | 40.9 | 0.6 | 82.8 | 6.6 | 81.7 | 0.3 |
| CR001031 | 40.8 | 0.1 | 81.5 | 1.8 | 90.7 | 1.8 |
| CR001092 | 40.8 | 2.2 | 84.1 | 0.1 | 43.0 | 1.1 |
| CR001034 | 40.7 | 1.0 | 84.5 | 0.0 | 72.7 | 3.8 |
| CR001068 | 40.7 | 2.3 | 85.7 | 0.4 | 90.5 | 0.9 |
| CR001168 | 40.2 | 3.4 | 82.6 | 0.1 | 74.2 | 7.1 |
| CR001171 | 40.1 | 1.6 | 83.4 | 0.4 | 63.8 | 1.6 |
| CR001217 | 40.1 | 0.8 | 81.9 | 0.1 | 80.9 | 0.8 |
| CR001023 | 39.6 | 3.2 | 82.2 | 0.8 | 90.2 | 0.7 |
| CR001093 | 39.3 | 0.3 | 86 | 1.1 | 38.3 | 14.5 |
| CR001080 | 39.2 | 3.4 | 87.1 | 1.1 | 32.4 | 1.1 |
| CR001164 | 38.6 | 2.0 | 84.4 | 0.4 | 92.0 | 0.7 |
| CR001178 | 38.6 | 1.2 | 82.6 | 2.4 | 61.1 | 0.6 |
| CR001032 | 38.4 | 9.2 | 82.4 | 0.6 | 57.6 | 32.9 |
| CR001100 | 38.4 | 1.8 | 81.7 | 0.2 | 29.6 | 2.4 |
| CR001156 | 38.4 | 1.2 | 81.6 | 0.3 | 91.2 | 3.6 |
| CR001159 | 38.4 | 1.8 | 81.8 | 0.2 | 65.5 | 0.7 |
| CR001042 | 38.2 | 0.4 | 83.1 | 1.0 | 90.8 | 0.3 |
| CR001065 | 38.2 | 0.0 | 85.2 | 2.0 | 86.5 | 0.2 |
| CR001133 | 38.1 | 0.0 | 83.6 | 0.5 | 92.1 | 0.8 |
| CR001173 | 38 | 1.5 | 81.7 | 1.1 | 72.5 | 5.0 |
| CR001161 | 37.7 | 4.6 | 82.3 | 1.7 | 54.8 | 10.7 |
| CR001138 | 37.6 | 7.6 | 83.7 | 0.7 | 69.4 | 28.9 |
| CR001037 | 37.4 | 1.3 | 81.2 | 0.8 | 90.5 | 1.5 |
| CR001098 | 37.4 | 1.2 | 85.6 | 1.5 | 95.0 | 0.2 |
| CR001150 | 37.3 | 2.0 | 84.8 | 0.4 | 52.8 | 7.5 |
| CR001160 | 37.3 | 0.5 | 81.4 | 1.5 | 65.9 | 1.6 |
| CR001197 | 37.3 | 1.1 | 83.3 | 1.6 | 83.8 | 2.8 |
| CR001170 | 37.2 | 1.3 | 83.7 | 1.2 | 47.3 | 0.3 |
| CR001226 | 37 | 1.0 | 82.5 | 1.3 | 65.3 | 2.0 |
| CR001018 | 36.9 | 0.8 | 80.9 | 0.8 | 97.2 | 0.0 |
| CR001109 | 36.8 | 0.3 | 84.7 | 1.4 | 91.0 | 2.4 |
| CR001219 | 36.8 | 0.6 | 82.5 | 0.1 | 75.9 | 0.2 |
| CR001047 | 36.7 | 0.6 | 83.2 | 0.3 | 70.8 | 1.5 |
| CR001101 | 36.6 | 3.3 | 81.7 | 0.1 | 50.6 | 3.8 |
| CR001046 | 36.5 | 1.0 | 84 | 0.3 | 76.9 | 4.2 |
| CR001021 | 36.4 | 0.3 | 82.2 | 0.4 | 79.5 | 2.9 |
| CR001060 | 36.3 | 3.2 | 84.1 | 1.1 | 50.0 | 0.4 |
| CR001074 | 36.3 | 1.6 | 87.3 | 1.8 | 56.5 | 4.9 |
| CR001097 | 36.3 | 0.2 | 87.1 | 1.3 | 58.5 | 2.1 |
| CR001099 | 36.1 | 4.0 | 85.8 | 1.8 | 89.8 | 0.3 |
| CR001172 | 36.1 | 1.7 | 82.2 | 0.7 | 71.1 | 3.7 |
| CR001195 | 36.1 | 0.8 | 83.4 | 0.2 | 67.2 | 2.7 |
| CR001075 | 36 | 1.9 | 87.2 | 0.1 | 56.8 | 2.6 |
| CR001143 | 35.9 | 3.7 | 83.5 | 0.4 | 56.7 | 9.2 |
| CR001063 | 35.8 | 1.3 | 84.3 | 0.4 | 71.7 | 1.9 |
| CR001225 | 35.5 | 0.4 | 83.1 | 0.5 | 81.1 | 4.2 |
| CR001027 | 35.4 | 0.9 | 81.9 | 0.8 | 71.1 | 0.5 |
| CR001073 | 35.4 | 1.6 | 86.5 | 1.6 | 56.3 | 5.9 |
| CR001180 | 35.3 | 1.1 | 79.6 | 1.4 | 86.2 | 4.0 |
| CR001182 | 35.3 | 0.8 | 81.8 | 0.2 | 72.5 | 3.9 |
| CR001162 | 35.2 | 9.1 | 85 | 0.0 | 62.6 | 35.7 |
| CR001026 | 35.1 | 1.0 | 82.4 | 0.2 | 97.0 | 0.3 |
| CR001078 | 35 | 1.1 | 85 | 1.7 | 12.7 | 1.8 |
| CR001025 | 34.9 | 0.3 | 81.9 | 1.5 | 55.5 | 3.8 |
| CR001187 | 34.9 | 2.5 | 79.4 | 2.3 | 70.1 | 3.7 |
| CR001081 | 34.8 | 1.4 | 87.5 | 4.0 | 27.0 | 0.7 |
| CR001137 | 34.8 | 13.6 | 83.8 | 1.6 | 41.5 | 39.8 |
| CR001174 | 34.8 | 0.5 | 81.8 | 0.6 | 34.1 | 3.2 |
| CR001058 | 34.6 | 1.0 | 83.3 | 1.5 | 71.4 | 6.2 |
| CR001188 | 34.6 | 1.3 | 82.6 | 1.2 | 64.0 | 2.2 |
| CR001079 | 34.4 | 2.5 | 89.2 | 0.2 | 12.8 | 2.0 |
| CR001179 | 34.4 | 3.2 | 82 | 0.4 | 81.4 | 4.3 |
| CR001214 | 34 | 2.2 | 82.1 | 1.5 | 58.1 | 1.0 |
| CR001139 | 33.9 | 1.9 | 83 | 2.5 | 70.3 | 0.4 |
| CR001222 | 33.9 | 1.6 | 80.6 | 0.8 | 35.5 | 1.4 |
| CR001096 | 33.8 | 0.1 | 85.6 | 2.2 | 77.5 | 1.0 |
| CR001148 | 33.6 | 2.1 | 84.5 | 0.4 | 50.9 | 4.0 |
| CR001140 | 33.5 | 0.4 | 84 | 1.4 | 66.3 | 1.5 |
| CR001191 | 33.5 | 2.5 | 83.2 | 0.3 | 83.4 | 5.1 |
| CR001227 | 33.5 | 2.3 | 79 | 0.2 | 56.3 | 0.1 |
| CR001110 | 33.4 | 0.4 | 85.2 | 0.1 | 70.3 | 0.1 |
| CR001220 | 33.4 | 1.7 | 81.4 | 0.4 | 72.4 | 3.3 |
| CR001224 | 33.4 | 3.1 | 82.2 | 1.3 | 71.3 | 2.3 |
| CR001033 | 33.2 | 0.3 | 81.9 | 0.6 | 63.6 | 8.1 |
| CR001051 | 33.2 | 0.6 | 82.2 | 0.6 | 42.2 | 0.5 |
| CR001106 | 33.2 | 0.2 | 82.6 | 3.0 | 46.9 | 2.0 |
| CR001020 | 32.9 | 8.9 | 81.9 | 1.3 | 67.7 | 29.4 |
| CR001022 | 32.9 | 0.8 | 82.4 | 1.6 | 91.5 | 0.3 |
| CR001045 | 32.9 | 0.4 | 80.5 | 0.0 | 88.5 | 0.4 |
| CR001198 | 32.9 | 0.5 | 81.3 | 1.8 | 96.8 | 0.5 |
| CR001084 | 32.8 | 1.7 | 87.5 | 0.1 | 55.1 | 5.4 |
| CR001111 | 32.6 | 1.0 | 84.2 | 2.5 | 78.1 | 1.4 |
| CR001087 | 32.5 | 0.1 | 87.6 | 0.7 | 89.6 | 2.6 |
| CR001107 | 32.5 | 0.4 | 83.3 | 1.8 | 46.5 | 2.2 |
| CR001108 | 31.8 | 1.8 | 84.7 | 0.6 | 75.2 | 3.3 |
| CR001205 | 31.7 | 2.3 | 81.3 | 6.2 | 2.7 | 1.7 |
| CR001085 | 31.6 | 2.1 | 86 | 0.3 | 31.2 | 1.2 |
| CR001166 | 31.5 | 0.5 | 83.6 | 0.8 | 86.9 | 0.3 |
| CR001019 | 31.3 | 2.3 | 80.6 | 0.9 | 35.1 | 4.0 |
| CR001076 | 31.3 | 0.5 | 86.6 | 0.2 | 96.3 | 0.3 |
| CR001016 | 31.2 | 1.2 | 80.2 | 0.7 | 95.0 | 1.9 |
| CR001035 | 31.1 | 1.8 | 83.5 | 1.3 | 80.0 | 0.9 |
| CR001192 | 31 | 2.5 | 79.9 | 0.7 | 60.4 | 5.1 |
| CR001091 | 30.7 | 2.8 | 85.3 | 0.6 | 72.4 | 7.6 |
| CR001105 | 30.7 | 0.1 | 84.8 | 0.1 | 12.1 | 1.1 |
| CR001185 | 30.7 | 0.7 | 82.7 | 0.4 | 36.7 | 0.2 |
| CR001190 | 30.7 | 0.1 | 82.4 | 0.7 | 53.2 | 0.8 |
| CR001024 | 30.6 | 0.4 | 81.8 | 0.7 | 97.0 | 0.6 |
| CR001132 | 30.5 | 2.3 | 84.6 | 0.1 | 26.4 | 2.2 |
| CR001189 | 30.4 | 1.9 | 83.1 | 0.3 | 42.0 | 0.6 |
| CR001040 | 30.1 | 8.3 | 77.5 | 2.2 | 73.6 | 33.6 |
| CR001146 | 30.1 | 1.5 | 83.8 | 0.1 | 88.1 | 2.1 |
| CR001070 | 29.8 | 0.9 | 82.7 | 0.4 | 44.9 | 0.8 |
| CR001213 | 29.8 | 1.8 | 81.9 | 0.2 | 48.4 | 4.4 |
| CR001017 | 29.6 | 11.8 | 81.3 | 1.5 | 44.3 | 36.8 |
| CR001077 | 29.5 | 0.9 | 87.2 | 2.5 | 14.3 | 0.5 |
| CR001083 | 29.4 | 1.1 | 84.3 | 9.1 | 26.6 | 10.6 |
| CR001082 | 29 | 0.7 | 87.6 | 1.5 | 17.7 | 0.0 |
| CR001175 | 29 | 1.1 | 81.7 | 0.1 | 6.3 | 0.7 |
| CR001144 | 28.9 | 0.4 | 82.6 | 0.9 | 38.8 | 1.1 |
| CR001194 | 28.8 | 4.3 | 81.8 | 0.6 | 70.2 | 1.9 |
| CR001157 | 28.5 | 1.1 | 81 | 1.3 | 29.2 | 4.2 |
| CR001163 | 28.4 | 0.6 | 83.5 | 0.7 | 13.4 | 3.0 |
| CR001151 | 28.2 | 0.6 | 84.6 | 1.6 | 51.8 | 2.3 |
| CR001181 | 28.2 | 0.2 | 80.3 | 0.8 | 46.0 | 0.5 |
| CR001061 | 28 | 2.9 | 82.6 | 0.4 | 53.6 | 5.8 |
| CR001152 | 27.8 | 0.8 | 84.9 | 0.2 | 37.0 | 1.9 |
| CR001094 | 27.7 | 9.2 | 74.6 | 12.7 | 85.2 | 2.1 |
| CR001202 | 27.7 | 6.3 | 84 | 2.3 | 61.7 | 8.4 |
| CR001149 | 27.6 | 1.7 | 84.1 | 0.6 | 10.8 | 1.3 |
| CR001207 | 27.6 | 5.7 | 83.3 | 0.1 | 31.5 | 17.5 |
| CR001134 | 27.2 | 1.6 | 83.2 | 1.3 | 2.3 | 0.2 |
| CR001206 | 27.2 | 1.8 | 84.4 | 0.2 | 11.1 | 0.4 |
| CR001067 | 27 | 18.4 | 84.2 | 2.6 | 6.0 | 0.8 |
| CR001167 | 27 | 0.5 | 81.7 | 0.2 | 32.3 | 0.1 |
| CR001209 | 27 | 0.8 | 81.5 | 2.5 | 14.8 | 0.2 |
| CR001165 | 26.9 | 0.5 | 81.6 | 1.3 | 12.9 | 2.1 |
| CR001044 | 26.8 | 7.2 | 78.2 | 4.3 | 28.5 | 20.7 |
| CR001052 | 26.6 | 0.3 | 82.5 | 1.5 | 26.5 | 0.9 |
| CR001062 | 26.6 | 0.7 | 78.7 | 2.8 | 39.1 | 5.3 |
| CR001071 | 26.6 | 1.0 | 84.2 | 0.4 | 15.1 | 1.1 |
| CR001210 | 26.6 | 2.1 | 80.1 | 3.3 | 58.6 | 2.2 |
| CR001223 | 26.6 | 0.9 | 80.2 | 0.8 | 40.3 | 1.9 |
| CR001057 | 26.5 | 6.5 | 82.4 | 0.1 | 25.0 | 18.9 |
| CR001147 | 26.5 | 1.3 | 83.5 | 0.4 | 33.1 | 2.7 |
| CR001186 | 26.4 | 2.1 | 79.6 | 3.8 | 40.5 | 2.1 |
| CR001103 | 26.1 | 0.2 | 84.3 | 0.0 | 51.2 | 3.6 |
| CR001199 | 25.9 | 0.8 | 80.9 | 1.5 | 89.3 | 1.4 |
| CR001216 | 25.7 | 1.0 | 77.7 | 0.0 | 43.2 | 2.7 |
| CR001041 | 25.6 | 1.8 | 78.9 | 4.8 | 22.4 | 2.1 |
| CR001053 | 25.5 | 1.4 | 82.4 | 1.9 | 38.4 | 0.3 |
| CR001086 | 25.4 | 0.6 | 84.4 | 0.9 | 30.4 | 0.6 |
| CR001050 | 25.1 | 0.4 | 80.6 | 1.1 | 4.9 | 0.2 |
| CR001136 | 25.1 | 0.7 | 82.3 | 1.0 | 9.1 | 1.1 |
| CR001203 | 25.1 | 4.0 | 83.4 | 1.8 | 22.0 | 13.1 |
| CR001211 | 24.8 | 1.1 | 83.3 | 0.4 | 5.0 | 1.0 |
| CR001066 | 24.4 | 0.4 | 86.1 | 0.1 | 15.2 | 1.8 |
| CR001145 | 24.4 | 1.0 | 83.5 | 0.9 | 16.4 | 8.9 |
| CR001049 | 24.3 | 0.3 | 83.9 | 1.9 | 3.7 | 0.0 |
| CR001176 | 24.3 | 0.6 | 81.9 | 0.6 | 29.0 | 1.4 |
| CR001218 | 24.1 | 0.2 | 81.9 | 0.1 | 21.6 | 2.4 |
| CR001141 | 23.8 | 0.5 | 82.8 | 0.4 | 4.1 | 0.8 |
| CR001196 | 23.6 | 0.8 | 82.5 | 0.6 | 18.2 | 2.9 |
| CR001184 | 23.5 | 0.4 | 81.1 | 0.4 | 43.5 | 1.6 |
| CR001204 | 23.3 | 1.1 | 81.5 | 0.7 | 0.5 | 0.2 |
| CR001069 | 23.1 | 1.1 | 85 | 0.0 | 16.2 | 0.3 |
| CR001072 | 23 | 0.3 | 84.2 | 0.7 | 15.6 | 0.3 |
| CR001102 | 22.8 | 1.7 | 84.7 | 1.6 | 58.1 | 4.8 |
| CR001153 | 22.8 | 1.3 | 82.8 | 0.1 | 17.2 | 2.6 |
| CR001177 | 22.8 | 0.5 | 82.2 | 0.9 | 2.0 | 0.2 |
| CR001104 | 22.7 | 1.7 | 84.8 | 1.1 | 29.4 | 5.0 |
| CR001064 | 22.6 | 1.1 | 82.1 | 1.0 | 35.8 | 5.2 |
| CR001200 | 22.6 | 0.1 | 82 | 0.0 | 9.8 | 0.7 |
| CR001154 | 22.4 | 0.0 | 82.2 | 1.3 | 8.0 | 1.1 |
| CR001055 | 22.3 | 1.0 | 83.4 | 1.1 | 19.0 | 0.8 |
| CR001054 | 22 | 1.1 | 83.5 | 1.0 | 11.3 | 1.4 |
| CR001039 | 21.9 | 0.2 | 80.8 | 0.2 | 16.6 | 1.5 |
| CR001183 | 21.6 | 0.7 | 81.4 | 0.8 | 13.3 | 0.1 |
| CR001155 | 21.4 | 0.0 | 81.6 | 0.8 | 5.0 | 1.0 |
| CR001059 | 21.1 | 0.6 | 82.5 | 1.2 | 4.6 | 0.3 |
| CR001056 | 20.8 | 0.9 | 83.2 | 0.2 | 3.7 | 0.9 |
| CR001193 | 20.5 | 0.9 | 80.4 | 0.9 | 4.8 | 0.2 |
| CR001208 | 20.5 | 0.1 | 81.1 | 0.9 | 12.6 | 3.0 |
| CR001201 | 20.1 | 1.7 | 81.7 | 0.6 | 10.7 | 0.7 |
| CR001048 | 19.3 | 3.0 | 82.3 | 1.1 | 0.4 | 0.3 |
| CR001215 | 19.2 | 0.2 | 81.2 | 2.3 | 5.6 | 2.2 |
| CR001038 | 19.1 | 0.1 | 80.8 | 1.3 | 6.5 | 1.1 |
| CR001088 | 18.8 | 5.9 | 67.3 | 2.7 | 74.6 | 2.3 |
| None/control | 21.0 | 2.0 | 82.9 | 1.9 | n/a | n/a |
| g8 | 59.2 | 3.0 | 74.3 | 4.4 | 95.1 | 1.8 |

[0968] The genome edited and unedited HSPC were analyzed by flow cytometry for expression levels of fetal globin and two erythroid cell surface markers, transferrin receptor (CD71) and glycophorin A (CD235a) using antibodies conjugated to fluorescent dyes. The live cells were identified and gated by exclusion of Live Dead Violet. Genome editing did not adversely affect erythroid differentiation as the cultured cells showed percentages of CD71+ cells consistent with erythroblasts similar to unedited cells. HPFH region targeting resulted in increased percentage of erythroid cells containing HbF (up to 51.4%) compared to mock electroporated cells (21.0%) (Table 16). Induction of HbF positive cells by dgRNA including the targeting domain of g8 targeting exon 2 of BCL11A was also observed in parallel. Genomic PCR products of the HPFH region were also subjected to next generation sequencing (NGS) to determine the percentage of edited alleles in the cell population. High genome editing percentages at the HFPH locus was observed in many of the cell cultures electroporated with RNPs containing Cas9, crRNA of the given targeting domain and Tracr (Table 16), but not in control cells with no targeting domain delivered (RNPs containing only Cas9 and Tracr). In particular, the dgRNA treatments that resulted in greater than 40% HbF+ cells had a range of 43.0% to 91.7% edited alleles (Table 16).

TABLE 18
Gene expression analysis of select cultures edited with gRNAs targeting
the HPFH region in the current study. All gRNA molecules were tested in
duplicate in the dgRNA format. Fetal gamma-globin (γ-globin, HBG2/
HBG1 genes), adult beta-globin (β-globin, HBB gene) and
Glyceraldehyde-3-Phosphate Dehydrogenase (GAPDH gene)
expression were determined and reported as described
in Materials and Methods.

| | | γ-globin | β-globin | |
|---|---|---|---|---|
| | | expression, | expression, | % globin |
| | | fold over | fold over | expression, |
| Guide RNA | Number of | control | control | γ/(γ + β) |
| targeting | electroporation | (average of | (average of | (average of |
| domain ID | replicates | replicates) | replicates) | replicates) |
| CR001030 | 2 | 3.8 | 0.91 | 26.6 |
| CR001142 | 2 | 1.6 | 0.76 | 20.0 |
| CR001212 | 2 | 2.2 | 0.58 | 18.6 |
| CR001036 | 2 | 2.6 | 0.91 | 19.7 |
| CR001221 | 2 | 2.3 | 0.79 | 15.2 |
| CR001217 | 2 | 1.9 | 0.72 | 13.8 |
| None/control | 5 | 1 | 1 | 7.7 |

[0969] Some cultures in this study were also analyzed for hemoglobin gene expression. Of these targeting domains, fetal gamma-globin gene expression was induced 1.6 to 3.8-fold over None/control, which was accompanied by a modest reduction in adult beta-globin expression (0.58 to 0.91-fold of None/control) (Table 18). These effects together resulted in gamma-globin expression levels ranging from 13.8% to 26.6% of the total beta-type globins (γ/[γ+β]) in the cell population (Table 17), with relative fetal globin induction across targeting domains similar to that observed for HbF protein induction (Table 16). Either an increase in HbF/gamma-globin or an increase in HbF/gamma-globin together with a decrease in beta-globin (sickled globin) levels in erythrocytes derived from genome edited cells is likely to have therapeutic implications by reduced sickling.

### Example 4.2

[0970] Methods: Methods are as in Example 4, with the Following Exceptions.

[0971] Assembly of Cas9 and guide RNA ribonucleoprotein (RNP) complexes, preparation of HSPC, and electroporation of RNP into HSPC. The HSPC collected by centrifugation were resuspended in P3 Primary Cell Solution (Lonza cat. No. PBP3-00675) at a cell density of 2.5×10⁶/mL. The RNP was mixed with 20 μL of cells by pipetting up and down and incubated at RT for 2 min. The RNP/cell mixture (20 μL) was electroporated using code CM-137 on the 4D-Nucleofector (Lonza).

[0972] Results:

[0973] Without being bound by theory, it is believed that targeted genetic disruption of the HPFH region will relieve repression of γ-globin expression, allowing production of the red blood cells containing elevated HbF protein, (cells expressing fetal hemoglobin are sometimes referred to herein as “F-cells”). The elevated HbF prevents sickling of the red blood cells under deoxygenated conditions and will be therapeutic/curative for the patients of both β-thalassemia and SCD. Autologous hematopoietic stem cell transplantation (HSCT) with ex vivo genome edited HSC from SCD patients was also combined with stem cell expansion enhancing technology, e.g., an aryl hydrocarbon receptor (AHR) inhibitor, e.g., as described in WO2010/059401 (the contents of which are incorporated by reference in their entirety), e.g., Compound 4 to improve ex vivo expansion and increase the dose of gene modified HSC delivered.

[0974] For efficient genome editing via programmable nuclease, Cas9, the successful delivery of guide RNA (gRNA) and Cas9 protein into target cells and tissues is essential. Recent reports demonstrated that Cas9 ribonucleoprotein (RNP) complexes when delivered into target cells by electroporation can accomplish efficient and specific genome editing in several different cell types. Cas9-RNP complexes cleave chromosomal DNA almost immediately after delivery and are degraded rapidly in cells, reducing off-target effects. In contrast, use of plasmid and viral vector systems used to deliver Cas9 results in prolonged expression of the enzyme aggravating off-target effects associated with the system. Additionally, delivery of RNPs into the target cells requires no additional tools which would greatly facilitate translation of genome editing for therapeutic purposes in the clinic. Purified recombinant Cas9 protein and gRNA complexes (RNPs) were delivered into cultured HSPC and an overview experiments used are shown in FIG. 17.

[0975] Recombinant Cas9 protein was purified from Escherichia coli and complexed with synthetic dual gRNAs (dgRNA) that consist of crRNA and tracr to generate ribonucleoprotein (RNP) complexes. The list of gRNAs used in the study are shown in Table 19. The RNP complexes were electroporated into CD34+ HSPC via electroporation as described under materials and methods. The cells were expanded prior to the delivery of RNP complexes. Actively dividing cells may facilitate uptake of RNP complexes delivered by electroporation.

TABLE 19
List of gRNAs targeting the HPFH region used in the current study. All
gRNA molecules were tested in the dgRNA format (except for g8 which
was tested in the dgRNA format using: crRNA consisting of
mN*mN*mN*rNrNrNrNrNrNrNrNrNrNrNrNrNrNrNrNrNrGrUrUrUr-
UrArGrArGrCrUrArU*mG*mC*mU (SEQ ID NO: 7832),
where N's are the residues
of the targeting domain, and modifications are indicated as
follows: 2′O-Methyl (m) and Phosphorothioate Bond (*); with the
tracr sequence SEQ ID NO: 7808).

| Guide RNA | | |
|---|---|---|
| targeting | % HbF+ (F | |
| domain ID | cells) | % CD71+ |
| CR003037 | 46.6 | 80.3 |
| CR003033 | 45.4 | 75.9 |
| CR003038 | 42.9 | 77.6 |
| CR003035 | 42.1 | 77.8 |
| CR003087 | 42.1 | 76.7 |
| CR003085 | 41.8 | 77.6 |
| CR003052 | 39.9 | 80.5 |
| CR003080 | 38.0 | 80.1 |
| CR003081 | 35.3 | 80.6 |
| CR003031 | 34.8 | 77.7 |
| CR003056 | 34.3 | 78.3 |
| CR003070 | 33.9 | 81.2 |
| CR003089 | 33.8 | 77.8 |
| CR003065 | 33.0 | 76.4 |
| CR003075 | 33.0 | 75.2 |
| CR003088 | 33.0 | 77.3 |
| CR003041 | 32.1 | 76.2 |
| CR003039 | 31.9 | 75.7 |
| CR003044 | 30.6 | 77.7 |
| CR003084 | 29.7 | 77.2 |
| CR003073 | 29.5 | 76.9 |
| CR003066 | 29.3 | 77.9 |
| CR003082 | 29.3 | 78.6 |
| CR003067 | 29.2 | 78.1 |
| CR003074 | 29.1 | 77.5 |
| CR003095 | 28.8 | 80.4 |
| CR003083 | 28.3 | 76.6 |
| CR003030 | 27.9 | 78.4 |
| CR003069 | 27.7 | 78.9 |
| CR003055 | 27.6 | 78.9 |
| CR003058 | 27.6 | 78.8 |
| CR003054 | 27.5 | 79.0 |
| CR003029 | 27.1 | 78.4 |
| CR003086 | 27.1 | 76.6 |
| CR003063 | 27.0 | 76.0 |
| CR003071 | 26.5 | 79.5 |
| CR003079 | 26.5 | 78.0 |
| CR003042 | 26.4 | 77.0 |
| CR003045 | 26.3 | 78.0 |
| CR003034 | 25.9 | 76.8 |
| CR003027 | 25.7 | 79.2 |
| CR003043 | 25.0 | 76.0 |
| CR003032 | 24.9 | 77.9 |
| CR003040 | 24.9 | 75.7 |
| CR003028 | 24.8 | 78.6 |
| CR003048 | 24.8 | 80.4 |
| CR003057 | 24.7 | 79.0 |
| CR003096 | 24.6 | 78.9 |
| CR003077 | 24.4 | 77.7 |
| CR003036 | 24.3 | 76.8 |
| CR003049 | 24.3 | 78.4 |
| CR003047 | 24.0 | 78.2 |
| CR003059 | 23.9 | 80.2 |
| CR003051 | 23.7 | 77.2 |
| CR003053 | 23.7 | 76.9 |
| CR003091 | 23.7 | 80.2 |
| CR003093 | 23.7 | 79.2 |
| CR003060 | 23.6 | 78.9 |
| CR003072 | 23.6 | 77.7 |
| CR003076 | 23.6 | 78.0 |
| CR003078 | 23.6 | 78.0 |
| CR003064 | 23.4 | 75.9 |
| CR003046 | 23.3 | 80.5 |
| CR003092 | 22.9 | 81.7 |
| CR003090 | 22.7 | 79.7 |
| CR003050 | 22.6 | 77.2 |
| CR003062 | 22.1 | 76.5 |
| CR003061 | 21.5 | 76.3 |
| CR003068 | 21.5 | 78.8 |
| CR003094 | 21.0 | 79.6 |
| None/control | 18.9 | 77.0 |
| replicate 1 | | |
| None/control | 21.1 | 79.7 |
| replicate 2 | | |
| g8 replicate 1 | 56.8 | 65.4 |
| g8 replicate 2 | 56.4 | 65.8 |

[0976] The genome edited and unedited HSPC were analyzed by flow cytometry for expression levels of fetal globin and two erythroid cell surface markers, transferrin receptor (CD71) and glycophorin A (CD235a) using antibodies conjugated to fluorescent dyes. The live cells were identified and gated by exclusion of Live Dead Violet. Genome editing did not adversely affect erythroid differentiation as the cultured cells showed percentages of CD71+ cells consistent with erythroblasts similar to unedited cells. HPFH region targeting resulted in increased percentage of erythroid cells containing HbF (up to 46.6%) compared to mock electroporated cells (18.9 and 21.1%) (Table 19). Induction of HbF positive cells by dgRNA including the targeting domain of g8 targeting exon 2 of BCL11A was also observed in parallel.

[0977] Finally, the indel pattern created at or near the target site for dgRNAs comprising the targeting domains of CR003031, CR003033, CR003035, CR003037, CR003038, CR003052, CR003085 were assessed by NGS. The top 5 most frequent indels at each location are shown in Table 27.

TABLE 27
5 most frequent indels at each taget sequence after exposure to RNP
comprising the indicated gRNA molecule. Each gRNA was tested in dgRNA.
Capital letters are the naturally occurring nucleotides at and near the target
sequence. Deletions relative to the unmodified target sequence are shown
as “—”; insertions are shown as lowercase letters.

| dgRNA | | | |
|---|---|---|---|
| targeting | | % of all | Indel |
| domain | Variant Read (Genomic Sequence) | reads | Length |
| CR003031 | ACTGTTGATTAGAGGTAGGGAAATGATTTTAATCTGTGACCTTGG------- | 9.74% | −7 |
| | GCAAGTAGCTATCTAATGACTAAAATGG | | |
| CR003031 | ACTGTTGATTAGAGGTAGGGAAATGATTTTAATCTGTGACCTTGGTtGAATGGGC | 7.82% | 1 |
| | AAGTAGCTATCTAATGACTAAAATGG | | |
| CR003031 | ACTGTTGATTAGAGGTAGGGAAATGATTTTAATCTGTGACCTTG--- | 2.19% | −3 |
| | AATGGGCAAGTAGCTATCTAATGACTAAAATGG | | |
| CR003031 | ACTGTTGATTAGAGGTAGGGAAATGATTTTAATCTGTGACCTTG- | 1.37% | −1 |
| | TGAATGGGCAAGTAGCTATCTAATGACTAAAATGG | | |
| CR003031 | ACTGTTGATTAGAGGTAGGGAAATGATTTTAATCTGTGA--------- | 1.33% | −9 |
| | ATGGGCAAGTAGCTATCTAATGACTAAAATGG | | |
| CR003031 | | . . . | . . . |
| CR003033 | ATGGGCAAGTAGCTATCTAATGACTAAAATGGAA---------- | 25.21% | −10 |
| | GAGAAACAGTTTTAGTATAACAAGTGAAATACCCAT | | |
| CR003033 | ATGGGCAAGTAGCTATCTAATGACTAAAATGGAAAAaCACTGGAAGAGAAACAGT | 7.77% | 1 |
| | TTTAGTATAACAAGTGAAATACCCAT | | |
| CR003033 | ATGGGCAAGTAGCTATCTAATGACTAAAATGGAA-- | 5.72% | −2 |
| | CACTGGAAGAGAAACAGTTTTAGTATAACAAGTGAAATACCCAT | | |
| CR003033 | ATGGGCAAGTAGCTATCTAATGACTAAAATGGAAAAC-- | 2.94% | −2 |
| | TGGAAGAGAAACAGTTTTAGTATAACAAGTGAAATACCCAT | | |
| CR003033 | ATGGGCAAGTAGCTATCTAATGACTAAAATGGAAAACcACTGGAAGAGAAACAGT | 1.68% | 1 |
| | TTTAGTATAACAAGTGAAATACCCAT | | |
| CR003033 | | . . . | . . . |
| CR003035 | CACTGGAAGAGAAACAGTTTTAGTATAACAAGTGAAATACCCATG--- | 10.87% | −3 |
| | AGTCTGAGGTGCCTATAGGACATCTATATAAA | | |
| CR003035 | CACTGGAAGAGAAACAGTTTTAGTATAACAAGTGAAATACCCAT- | 2.62% | −1 |
| | CTGAGTCTGAGGTGCCTATAGGACATCTATATAAA | | |
| CR003035 | CACTGGAAGAGAAACAGTTTTAGTATAACAAGTGAAATACCCA-- | 2.04% | −2 |
| | CTGAGTCTGAGGTGCCTATAGGACATCTATATAAA | | |
| CR003035 | CACTGGAAGAGAAACAGTTTTAGTATAACAAGTGAAATACCCATG-- | 1.79% | −2 |
| | GAGTCTGAGGTGCCTATAGGACATCTATATAAA | | |
| CR003035 | CACTGGAAGAGAAACAGTTTTAGTATAACAAGTGAAATACCC---- | 1.77% | −4 |
| | TGAGTCTGAGGTGCCTATAGGACATCTATATAAA | | |
| CR003035 | | . . . | . . . |
| CR003037 | TAACAAGTGAAATACCCATGCTGAGTCTGAGG---------- | 7.19% | −10 |
| | ACATCTATATAAATAAGCCCAGTACATTGTTTGATATA | | |
| CR003037 | TAACAAGTGAAATACCCATGCTGAGTCTGAGGTGCC- | 6.13% | −1 |
| | ATAGGACATCTATATAAATAAGCCCAGTACATTGTTTGATATA | | |
| CR003037 | TAACAAGTGAAATACCCATGCTGAGTCTGAGGTGCCcTATAGGACATCTATATAA | 4.17% | 1 |
| | ATAAGCCCAGTACATTGTTTGATATA | | |
| CR003037 | TAACAAGTGAAATACCCATGCTGAGTCTGAGGTGCCTtATAGGACATCTATATAA | 3.89% | 1 |
| | ATAAGCCCAGTACATTGTTTGATATA | | |
| CR003037 | TAACAAGTGAAATACCCATGCTGAGTCTGAGGTGC- | 3.72% | −1 |
| | TATAGGACATCTATATAAATAAGCCCAGTACATTGTTTGATATA | | |
| CR003037 | | . . . | . . . |
| CR003038 | TAGTATAACAAGTGAAATACCCATGCTGAGTCTGAGGTGCCTATA----------- | 14.85% | −11 |
| | TAAATAAGCCCAGTACATTGTTTG | | |
| CR003038 | TAGTATAACAAGTGAAATACCCATGCTGAGTCTGAGGTGCCTATAG- | 6.25% | −1 |
| | ACATCTATATAAATAAGCCCAGTACATTGTTTG | | |
| CR003038 | TAGTATAACAAGTGAAATACCCATGCTGAGTCTGAGGTGCCTAT- | 3.99% | −1 |
| | GGACATCTATATAAATAAGCCCAGTACATTGTTTG | | |
| CR003038 | TAGTATAACAAGTGAAATACCCATGCTGAGTCTGAGGTGCCTATAGGgACATCTA | 2.83% | 1 |
| | TATAAATAAGCCCAGTACATTGTTTG | | |
| CR003038 | TAGTATAACAAGTGAAATACCCATGCTGAGTCTGAGGTGCCTATAaGGACATCTA | 2.76% | 1 |
| | TATAAATAAGCCCAGTACATTGTTTG | | |
| CR003038 | | . . . | . . . |
| CR003052 | TCAGAGGTTAGAAATCAGAGTTGGGAATTGGGATTA-- | 14.04% | −2 |
| | CAGGCTGTATTTAAGAGTTTAGATATAACTGTGAATCCAAGA | | |
| CR003052 | TCAGAGGTTAGAAATCAGAGTTGGGAATTGGGATTAaTACAGGCTGTATTTAAGA | 2.94% | 1 |
| | GTTTAGATATAACTGTGAATCCAAGA | | |
| CR003052 | TCAGAGGTTAGAAATCAGAGTTGGGAATTGGGATT- | 2.41% | −1 |
| | TACAGGCTGTATTTAAGAGTTTAGATATAACTGTGAATCCAAGA | | |
| CR003052 | TCAGAGGTTAGAAATCAGAGTTGGGAATTGGGATTATtACAGGCTGTATTTAAGA | 2.37% | 1 |
| | GTTTAGATATAACTGTGAATCCAAGA | | |
| CR003052 | TCAGAGGTTAGAAATCAGAGTTGGGAATTGGGATTAaaTACAGGCTGTATTTAAG | 2.28% | 2 |
| | AGTTTAGATATAACTGTGAATCCAAGA | | |
| CR003052 | | . . . | . . . |
| CR003085 | TGTAAGGAGGATGAGCCACATGGTATGGGAGGTAT- | 12.03% | −1 |
| | CTAAGGACTCTAGGGTCAGAGAAATATGGGTTATATCCTTCTAC | | |
| CR003085 | TGTAAGGAGGATGAGCCACATGGTATGGGAGG---------- | 8.70% | −10 |
| | ACTCTAGGGTCAGAGAAATATGGGTTATATCCTTCTAC | | |
| CR003085 | TGTAAGGAGGATGAGCCACATGGTATGGGA------------- | 4.42% | −13 |
| | CTCTAGGGTCAGAGAAATATGGGTTATATCCTTCTAC | | |
| CR003085 | TGTAAGGAGGATGAGCCACATGGTATGGGAGGTATAaCTAAGGACTCTAGGGTCA | 4.38% | 1 |
| | GAGAAATATGGGTTATATCCTTCTAC | | |
| CR003085 | TGTAAGGAGGATGAGCCACATGGTATGGGAGGTA----- | 3.41% | −5 |
| | AGGACTCTAGGGTCAGAGAAATATGGGTTATATCCTTCTAC | | |
| CR003085 | | . . . | . . . |
| CR003087 | GATGAGCCACATGGTATGGGAGGTATACTAAGGACTtCTAGGGTCAGAGAAATAT | 24.73% | 1 |
| | GGGTTATATCCTTCTACAAAATTCAC | | |
| CR003087 | GATGAGCCACATGGTATGGGAGGTATACTA--------- | 15.83% | −9 |
| | GGGTCAGAGAAATATGGGTTATATCCTTCTACAAAATTCAC | | |
| CR003087 | GATGAGCCACATGGTATGGGAGGTATACTAAGG-------- | 8.50% | −8 |
| | GTCAGAGAAATATGGGTTATATCCTTCTACAAAATTCAC | | |
| CR003087 | GATGAGCCACATGGTATGGGAGGTATACTAAGGACT-- | 7.07% | −2 |
| | AGGGTCAGAGAAATATGGGTTATATCCTTCTACAAAATTCAC | | |
| CR003087 | GATGAGCCACATGGTATGGGAGGTATACTAAGG--------- | 1.75% | −9 |
| | TCAGAGAAATATGGGTTATATCCTTCTACAAAATTCAC | | |
| CR003087 | | . . . | . . . |

[0978] These results support the conclusion from earlier experiments described herein that small indels (e.g., in this case, indels from 1-20 nucleotides) in the HPFH region targeted by the indicated gRNA molecule can have a significant impact on expression and production of HbF. An increase in HbF-containing erythrocytes derived from genome edited cells is likely to have therapeutic implications by reduced sickling.

### Example 4.3

[0979] Methods: Methods are as in Example 4, with the following exceptions.

[0980] Human CD34⁺ cell culture. Human CD34+ cells were expanded for 3 days prior to RNP delivery in expansion medium.

[0981] Assembly of Cas9 and guide RNA ribonucleoprotein (RNP) complexes, preparation of HSPC, and electroporation of RNP into HSPC. The HSPC collected by centrifugation were resuspended in P3 Primary Cell Solution (Lonza cat. No. PBP3-00675) at a cell density of 6.4×10⁶/mL. The RNP was mixed with 20 μL of cells by pipetting up and down and incubated at RT for 2 min. The RNP/cell mixture (20 μL) was electroporated using code CM-137 on the 4D-Nucleofector (Lonza). Electroporations were performed in duplicate. The Tracr was SEQ ID NO: 7808 and the crRNA had the following format with 2′O-Methyl (m) and Phosphorothioate Bond (*) modifications indicated: mN*mN*mN*rNrNrNrNrNrNrNrNrNrNrNrNrNrNrNrNrNrGrUrUrUrUrArGrArGrCrUrArU*mG*mC*mU (SEQ ID NO: 7832), where N's are the nucleotides of the targeting domain.

[0982] In vitro erythropoiesis and FACS analysis for HbF containing erythroid cells. After electroporation, the cells were immediately transferred into pre-warmed medium consisting of EDM and supplements. During days 0-7 of culture, EDM was further supplemented with 1 μM hydrocortisone (Sigma H8672), 100 ng/mL human SCF (Life Technologies, Cat. #PHC2113), and 5 ng/mL human IL-3 (Peprotech #10779-598). During days 7-11 of culture, EDM was supplemented with 100 ng/mL of human SCF only. During days 11-21 of culture, EDM had no additional supplements. Cell cultures were initiated at 2.6×10⁴ cells per ml on day 0, adjusted to 4.0×10⁴ cells per ml on day 7, and adjusted to 1.0×10⁶ cells per ml on day 11. On days 14 and 19, the media was replenished. Viable cells were counted at 1, 4, 7, 11, 14 and 21 days post-RNP delivery. All viable cell counts were determined by flow cytometry using AccuCheck Counting Beads (ThermoFisher cat. No. PCB100) with inviable cells discriminated by DAPI (4′,6-Diamidino-2-Phenylindole) staining. On days 7, 16 and 21 of the culture, the cells (1×10⁵) were analyzed by intracellular staining for HbF expression. On days 16 and 21 intracellular staining for HbF expression did not include anti-CD71 and anti-CD235a antibodies, and % of HbF positive cells (F-cells) in the entire viable cell population was reported. On day 21 LIVE/DEAD® Fixable Near-IR Dead Cell Stain (ThermoFisher L34975) was used as the viability dye.

[0983] Genomic DNA preparation and next generation sequencing (NGS). Genomic DNA was prepared from edited and unedited HSPC at 7 days post-electroporation using Quick Extract DNA Extraction Solution (Epicentre Cat #QE09050).

[0984] Results:

[0985] Without being bound by theory, it is believed that targeted genetic disruption of the HPFH region will relieve repression of γ-globin expression, allowing production of the red blood cells containing elevated HbF protein, (cells expressing fetal hemoglobin are sometimes referred to herein as “F-cells”). The elevated HbF prevents sickling of the red blood cells under deoxygenated conditions and will be therapeutic/curative for the patients of both β-thalassemia and SCD. Autologous hematopoietic stem cell transplantation (HSCT) with ex vivo genome edited HSC from SCD patients was also combined with stem cell expansion enhancing technology, e.g., an aryl hydrocarbon receptor (AHR) inhibitor, e.g., as described in WO2010/059401 (the contents of which are incorporated by reference in their entirety), e.g., Compound 4 to improve ex vivo expansion and increase the dose of gene modified HSC delivered.

[0986] For efficient genome editing via programmable nuclease, Cas9, the successful delivery of guide RNA (gRNA) and Cas9 protein into target cells and tissues is essential. Recent reports demonstrated that Cas9 ribonucleoprotein (RNP) complexes when delivered into target cells by electroporation can accomplish efficient and specific genome editing in several different cell types. Cas9-RNP complexes cleave chromosomal DNA almost immediately after delivery and are degraded rapidly in cells, reducing off-target effects. In contrast, use of plasmid and viral vector systems used to deliver Cas9 results in prolonged expression of the enzyme aggravating off-target effects associated with the system. Additionally, delivery of RNPs into the target cells requires no additional tools which would greatly facilitate translation of genome editing for therapeutic purposes in the clinic. Purified recombinant Cas9 protein and gRNA complexes (RNPs) were delivered into cultured HSPC and an overview experiments used are shown in FIG. 17.

[0987] Recombinant Cas9 protein was purified from Escherichia coli and complexed with synthetic dual gRNAs (dgRNA) that consist of crRNA and tracr to generate ribonucleoprotein (RNP) complexes. The list of gRNAs used in the study are shown in Table 20. The RNP complexes were electroporated into CD34+ HSPC via electroporation as described under materials and methods. The cells were expanded prior to the delivery of RNP complexes. Actively dividing cells may facilitate uptake of RNP complexes delivered by electroporation.

TABLE 20
Relative viable cell proliferation in the current study. Individual
electroporation replicates are shown. All gRNA molecules were
tested in the dgRNA format using the tracr SEQ ID NO: 7808,
and the crRNA had the following format with 2′O-Methyl (m)
and Phosphorothioate Bond (*) modifications indicated:
mN*mN*mN*rNrNrNrNrNrNrNrNrNrNrNrNrNrNrNrNrNrGrUrUr-
UrUrArGrArGrCrUrArU*mG*mC*mU, (SEQ ID NO: 7832),
where N's are the nucleotides
of the targeting domain. (n.d. not determined)

| Guide RNA targeting | | | | | | | |
|---|---|---|---|---|---|---|---|
| domain ID and replicate | Day 0 | Day 1 | Day 4 | Day 7 | Day 11 | Day 14 | Day 21 |
| CR001030 replicate 1 | 1 | 0.66 | 4.3 | 43.1 | 627 | 680 | 772 |
| CR001030 replicate 2 | 1 | 0.65 | 4.0 | 38.4 | 651 | 694 | 880 |
| CR001028 replicate 1 | 1 | 0.61 | 4.0 | 33.2 | 588 | 509 | 742 |
| CR001028 replicate 2 | 1 | 0.77 | 6.1 | 44.9 | 724 | 759 | 838 |
| CR001095 replicate 1 | 1 | 0.66 | 4.0 | 40.7 | 665 | 503 | 835 |
| CR001095 replicate 2 | 1 | 0.96 | 5.2 | 42.2 | 651 | 777 | n.d. |
| CR001212 replicate 1 | 1 | 0.58 | 3.4 | 33.6 | 465 | 414 | 495 |
| CR001212 replicate 2 | 1 | 0.74 | 3.6 | 32.4 | 490 | 519 | 572 |
| g8 replicate 1 | 1 | 0.61 | 4.4 | 31.8 | 221 | 341 | 91 |
| g8 replicate 2 | 1 | 0.60 | 5.2 | 33.2 | 269 | 270 | 103 |
| None/control replicate 1 | 1 | 0.79 | 7.6 | 58.5 | 741 | 862 | 707 |
| None/control replicate 2 | 1 | 0.71 | 8.2 | 51.4 | 923 | 1204 | 1075 |

[0988] The genome edited and unedited HSPC were analyzed for proliferation in a three-stage erythroid differentiation cell culture protocol. Percent cell recovery at 1 day after electroporation ranged from 58% to 96% and was similar across conditions, including the unedited but electroporated control (Table 20). Proliferation was suppressed in the cells edited by dgRNA including the targeting domain of g8 targeting exon 2 of BCL11A (10-12% of unedited control at day 21, Table 20), but proliferation of cells edited with the included HPFH region targeting dgRNAs was similar to control (47-99% of unedited control at day 21, Table 20).

TABLE 21
HbF induction in the current study. Individual electroporation replicates
are shown. All gRNA molecules were tested in the dgRNA format. All
gRNA molecules were tested in the dgRNA format using the tracr
SEQ ID NO: 7808, and the crRNA had the following format with 2′O-
Methyl (m) and Phosphorothioate Bond (*) modifications indicated:
mN*mN*mN*rNrNrNrNrNrNrNrNrNrNrNrNrNrNrNrNrNrGrUrUrUr-
UrArGrArGrCrUrArU*mG*mC*mU (SEQ ID NO: 7832),
where N's are the nucleotides of
the targeting domain. (n.d. not determined)

| Guide RNA | | | | | |
|---|---|---|---|---|---|
| targeting | % | % | % HbF+ | % HbF+ | % HbF+ |
| domain | edited, | CD71+, | (F cells), | (F cells), | (F cells), |
| ID and replicate | Day 7 | Day 7 | Day 7 | Day 16 | Day 21 |
| CR001030 | 90.7 | 91.2 | 61.0 | 45.4 | 53.7 |
| replicate 1 | | | | | |
| CR001030 | 90.1 | 91.1 | 63.9 | 44.3 | 55.9 |
| replicate 2 | | | | | |
| CR001028 | 91.9 | 90.0 | 61.6 | 40.9 | 52.0 |
| replicate 1 | | | | | |
| CR001028 | 87.6 | 90.7 | 56.3 | 46.6 | 45.8 |
| replicate 2 | | | | | |
| CR001095 | 25.7 | 91.4 | 51.3 | 36.8 | 43.7 |
| replicate 1 | | | | | |
| CR001095 | 30.5 | 91.1 | 52.5 | 42.7 | n.d. |
| replicate 2 | | | | | |
| CR001212 | 86.2 | 90.8 | 57.5 | 38.7 | 45.2 |
| replicate 1 | | | | | |
| CR001212 | 80.9 | 90.4 | 54.7 | 36.5 | 42.7 |
| replicate 2 | | | | | |
| g8 replicate 1 | 95.3 | 84.6 | 70.7 | 71.9 | 63.4 |
| g8 replicate 2 | 94.3 | 82.6 | 70.0 | 72.6 | 54.8 |
| None/control | n/a | 94.0 | 27.1 | 24.4 | 22.8 |
| replicate 1 | | | | | |
| None/control | n/a | 93.8 | 26.2 | 25.7 | 21.1 |
| replicate 2 | | | | | |

[0989] The genome edited and unedited HSPC were analyzed by flow cytometry for expression levels of fetal globin and two erythroid cell surface markers, transferrin receptor (CD71) and glycophorin A (CD235a) using antibodies conjugated to fluorescent dyes. The live cells were identified and gated by exclusion of Live/Dead Fixable Dead Cell Stain. Genome editing did not adversely affect erythroid differentiation as the cultured cells showed percentages of CD71+ cells consistent with erythroblasts similar to unedited cells at day 7 of differentiation. Cultures treated with the included HPFH region targeting dgRNAs resulted in increased percentage of erythroid cells containing HbF compared to mock electroporated cells throughout the 21 day culture period (Table 21). Induction of HbF positive cells by dgRNA including the targeting domain of g8 targeting exon 2 of BCL11A was also observed in parallel. Genomic PCR products of the HPFH region were also subjected to next generation sequencing (NGS) to determine the percentage of edited alleles in the cell population. Genome editing at the HFPH locus was observed in cell cultures electroporated with RNPs containing Cas9, crRNA of the given targeting domain and Tracr (Table 21), but not in control cells with no targeting domain delivered (RNPs containing only Cas9 and Tracr). An increase in HbF-containing erythrocytes derived from genome edited cells is likely to have therapeutic implications by reduced sickling.

### Example 4.4

[0990] Methods: Methods are as in Example 4, with the following exceptions.

[0991] Human CD34⁺ cell culture. Human CD34+ cells were expanded for 3 to 6 days prior to RNP delivery in expansion medium, depending on study.

[0992] Assembly of Cas9 and guide RNA ribonucleoprotein (RNP) complexes, preparation of HSPC, and electroporation of RNP into HSPC. For some studies, the RNP complexes were delivered using the 4D-Nucleofector (Lonza). In those studies, the HSPC collected by centrifugation were resuspended in P3 Primary Cell Solution (Lonza cat. No. PBP3-00675) at a cell density of 2.2×10⁶/mL to 6.4×10⁶/mL, depending on study. The RNP was mixed with 20 μL of cells by pipetting up and down and incubated at RT for 2 min. The RNP/cell mixture (20 μL) was electroporated using code CM-137 on the 4D-Nucleofector (Lonza). Electroporations were performed in duplicate. The dgRNA format varied between studies and is indicated in Table 22 by the following notation. Form A is the dgRNA format described above in Example 1, with the targeting domain sequence indicated. Form B is a dgRNA format using a crRNA of rNrNrNrNrNrNrNrNrNrNrNrNrNrNrNrNrNrNrNrNrGrUrUrUrUrArGrArGrCrUrArUrGrCrU (SEQ ID NO: 2003), where r indicates an RNA base and the N's correspond to the indicated targeting domain sequence, and a tracr consisting of SEQ ID NO: 7808. Form C is a dgRNA format using crRNA of the sequence mN*mN*mN*rNrNrNrNrNrNrNrNrNrNrNrNrNrNrNrNrNrGrUrUrUrUrArGrArGrCrUrArU*mG*mC*mU (SEQ ID NO: 7832), where r indicates an RNA base, N's corresponds to the indicated targeting domain sequence, m indicates a base with 2′O-Methyl modification, and * indicates a phosphorothioate bond, and the tracr consists of SEQ ID NO: 7808.

[0993] In vitro erythropoiesis and FACS analysis for HbF containing erythroid cells. In one study, cell cultures were initiated at 2.6×10⁴ cells per ml on day 0. For those initiated by seeding directly into 250 μl (as described in Example 4), the cell culture was diluted in fresh medium after 1 to 3 days, depending on the study.

[0994] Genomic DNA preparation and next generation sequencing (NGS). Genomic DNA was prepared from edited and unedited HSPC at 24 hours to 7 days post-electroporation, depending on the study, using Quick Extract DNA Extraction Solution (Epicentre Cat #QE09050).

[0995] Results:

[0996] Without being bound by theory, it is believed that targeted genetic disruption of the HPFH region will relieve repression of γ-globin expression, allowing production of the red blood cells containing elevated HbF protein, (cells expressing fetal hemoglobin are sometimes referred to herein as “F-cells”). The elevated HbF prevents sickling of the red blood cells under deoxygenated conditions and will be therapeutic/curative for the patients of both β-thalassemia and SCD. Autologous hematopoietic stem cell transplantation (HSCT) with ex vivo genome edited HSC from SCD patients was also combined with stem cell expansion enhancing technology, e.g., an aryl hydrocarbon receptor (AHR) inhibitor, e.g., as described in WO2010/059401 (the contents of which are incorporated by reference in their entirety), e.g., Compound 4 to improve ex vivo expansion and increase the dose of gene modified HSC delivered.

[0997] For efficient genome editing via programmable nuclease, Cas9, the successful delivery of guide RNA (gRNA) and Cas9 protein into target cells and tissues is essential. Recent reports demonstrated that Cas9 ribonucleoprotein (RNP) complexes when delivered into target cells by electroporation can accomplish efficient and specific genome editing in several different cell types. Cas9-RNP complexes cleave chromosomal DNA almost immediately after delivery and are degraded rapidly in cells, reducing off-target effects. In contrast, use of plasmid and viral vector systems used to deliver Cas9 results in prolonged expression of the enzyme aggravating off-target effects associated with the system. Additionally, delivery of RNPs into the target cells requires no additional tools which would greatly facilitate translation of genome editing for therapeutic purposes in the clinic. Purified recombinant Cas9 protein and gRNA complexes (RNPs) were delivered into cultured HSPC and an overview experiments used are shown in FIG. 17.

[0998] Recombinant Cas9 protein was purified from Escherichia coli and complexed with synthetic dual gRNAs (dgRNA) that consist of crRNA and tracr to generate ribonucleoprotein (RNP) complexes. The list of gRNAs used in the studies are shown in Table 22. The RNP complexes were electroporated into CD34+ HSPC via electroporation as described under materials and methods. The cells were expanded prior to the delivery of RNP complexes. Actively dividing cells may facilitate uptake of RNP complexes delivered by electroporation.

TABLE 22
Summary data for multiple studies evaluating indicated
gRNAs targeting the HPFH region and controls. All gRNA
molecules were tested in dgRNA formats. Details of the
dgRNA formats in the indicated studies are specified as
described above. Note that evaluations 4 and 5 were
performed in parallel and thus share control conditions.

| Guide RNA | | | | | | | | | |
|---|---|---|---|---|---|---|---|---|---|
| targeting | | Evaluation number | | | | | | | |
| domain ID | | 1 | 2 | 3 | 4 | 5 | 6 | 7 | 8 |
| CR001028 | Format | A | A | B | B | C | | | C |
| | Replicates | 2 | 2 | 2 | 2 | 2 | | | 2 |
| | % HbF+ (F cells), | 42.9 | 39.7 | 47.4 | 51.1 | 55.3 | | | 59.0 |
| | average of replicates | | | | | | | | |
| | % edited, average of | 91.7 | 78.0 | 87.5 | 90.9 | 84.6 | | | 89.8 |
| | replicates | | | | | | | | |
| CR001030 | Format | A | A | B | B | C | C | C | C |
| | Replicates | 2 | 2 | 2 | 2 | 2 | 2 | 2 | 2 |
| | % HbF+ (F cells), | 51.4 | 48.7 | 50.9 | 51.8 | 58.0 | 39.7 | 50.6 | 62.5 |
| | average of replicates | | | | | | | | |
| | % edited, average of | 84.5 | 61.8 | 74.3 | 75.0 | 85.6 | 94.1 | 85.4 | 90.4 |
| | replicates | | | | | | | | |
| CR001036 | Format | A | A | B | | | | | |
| | Replicates | 2 | 2 | 2 | | | | | |
| | % HbF+ (F cells), | 42.4 | 40.8 | 43.3 | | | | | |
| | average of replicates | | | | | | | | |
| | % edited, average of | 84.4 | 78.3 | 92.6 | | | | | |
| | replicates | | | | | | | | |
| CR001043 | Format | A | A | B | | | | | |
| | Replicates | 2 | 2 | 2 | | | | | |
| | % HbF+ (F cells), | 44.8 | 33.0 | 42.9 | | | | | |
| | average of replicates | | | | | | | | |
| | % edited, average of | 80.0 | 42.7 | 87.7 | | | | | |
| | replicates | | | | | | | | |
| CR001080 | Format | A | A | | | C | | | |
| | Replicates | 2 | 2 | | | 2 | | | |
| | % HbF+ (F cells), | 39.2 | 34.9 | | | 49.3 | | | |
| | average of replicates | | | | | | | | |
| | % edited, average of | 32.4 | 24.0 | | | 41.6 | | | |
| | replicates | | | | | | | | |
| CR001095 | Format | A | A | B | B | C | C | C | C |
| | Replicates | 2 | 2 | 1 | 2 | 2 | 2 | 2 | 2 |
| | % HbF+ (F cells), | 49.3 | 41.5 | 47 | 51.8 | 51.8 | 32.9 | 46.8 | 51.9 |
| | average of replicates | | | | | | | | |
| | % edited, average of | 66.1 | 49.8 | 65.1 | 64.6 | 64.2 | 66.8 | 56.1 | 28.1 |
| | replicates | | | | | | | | |
| CR001137 | Format | A | A | | | | C | C | |
| | Replicates | 2 | 2 | | | | 2 | 2 | |
| | % HbF+ (F cells), | 34.8 | 45.6 | | | | 31.0 | 40.8 | |
| | average of replicates | | | | | | | | |
| | % edited, average of | 41.5 | 46.9 | | | | 69.0 | 57.9 | |
| | replicates | | | | | | | | |
| CR001142 | Format | A | A | | | C | | | |
| | Replicates | 2 | 2 | | | 2 | | | |
| | % HbF+ (F cells), | 43.4 | 45.5 | | | 48.1 | | | |
| | average of replicates | | | | | | | | |
| | % edited, average of | 76.9 | 63.7 | | | 89.2 | | | |
| | replicates | | | | | | | | |
| CR001158 | Format | A | A | | | C | | | |
| | Replicates | 2 | 2 | | | 2 | | | |
| | % HbF+ (F cells), | 41.7 | 36.9 | | | 44.6 | | | |
| | average of replicates | | | | | | | | |
| | % edited, average of | 72.4 | 43.9 | | | 78.4 | | | |
| | replicates | | | | | | | | |
| CR001212 | Format | A | A | B | B | C | C | C | C |
| | Replicates | 2 | 2 | 2 | 2 | 2 | 2 | 2 | 2 |
| | % HbF+ (F cells), | 42.6 | 46.9 | 43.8 | 44.5 | 53.5 | 39.4 | 47.1 | 56.1 |
| | average of replicates | | | | | | | | |
| | % edited, average of | 81.6 | 58.1 | 48.6 | 47.5 | 69.2 | 82.0 | 67.0 | 83.6 |
| | replicates | | | | | | | | |
| CR001217 | Format | A | A | | | | C | C | |
| | Replicates | 2 | 2 | | | | 2 | 2 | |
| | % HbF+ (F cells), | 40.1 | 41.5 | | | | 29.9 | 45.9 | |
| | average of replicates | | | | | | | | |
| | % edited, average of | 80.9 | 50.3 | | | | 89.0 | 82.1 | |
| | replicates | | | | | | | | |
| CR001221 | Format | A | A | B | B | C | | | |
| | Replicates | 2 | 2 | 1 | 2 | 2 | | | |
| | % HbF+ (F cells), | 41.8 | 45.2 | 44.6 | 46.2 | 48.6 | | | |
| | average of replicates | | | | | | | | |
| | % edited, average of | 83.9 | 71.1 | 73.6 | 70.7 | 92.1 | | | |
| | replicates | | | | | | | | |
| g8 | Format | C | C | C | C | C | | C | C |
| | Replicates | 16 | 2 | 2 | 2 | 2 | | 2 | 2 |
| | % HbF+ (F cells), | 59.2 | 60.0 | 66.3 | 64.7 | 64.7 | | 55.8 | 70.4 |
| | average of replicates | | | | | | | | |
| | % edited, average of | 95.1 | 85.4 | 94.2 | 94.6 | 94.6 | | 91.7 | 94.8 |
| | replicates | | | | | | | | |
| None/control | Format | n/a | n/a | n/a | n/a | n/a | n/a | n/a | n/a |
| | Replicates | 16 | 2 | 2 | 2 | 2 | 2 | 2 | 2 |
| | % HbF+ (F cells), | 21.0 | 20.3 | 22.4 | 22.4 | 22.4 | 13.9 | 24.0 | 26.7 |
| | average of replicates | | | | | | | | |
| | % edited, average of | n/a | n/a | n/a | n/a | n/a | n/a | n/a | n/a |
| | replicates | | | | | | | | |

[0999] The genome edited and unedited HSPC were analyzed by flow cytometry for expression levels of fetal globin and two erythroid cell surface markers, transferrin receptor (CD71) and glycophorin A (CD235a) using antibodies conjugated to fluorescent dyes. The live cells were identified and gated by exclusion of Live Dead Violet. HPFH region targeting resulted in increased percentage of erythroid cells containing HbF compared to mock electroporated cells, a consistent result across multiple evaluations and dgRNA formats (Table 22). In some instances, an increase in % HbF+ cells was associated with a particular dgRNA form, for example Form C for CR001028 (Table 22). Induction of HbF positive cells by dgRNA including the targeting domain of g8 targeting exon 2 of BCL11A was also observed in parallel. Genomic PCR products of the HPFH region were also subjected to next generation sequencing (NGS) to determine the percentage of edited alleles in the cell population. Genome editing at the HFPH locus was observed in cell cultures electroporated with RNPs containing Cas9, crRNA of the given targeting domain and Tracr (Table 22), but not in control cells with no targeting domain delivered (RNPs containing only Cas9 and Tracr).

[1000] Finally, the indel pattern as well as frequency of each indel was assessed for each gRNA by NGS. The most frequently occurring indels at each target site are shown in Table 26.

TABLE 26
5 most frequent indels at each taget sequence after exposure to RNP comprising the
indicated gRNA molecule. Each gRNA was tested in dgRNA format in two separate experiments,
and the results are shown seperately for each experiment. Capital letters are the naturally
occurring nucleotides at and near the target sequence. Deletions relative to the unmodified
target sequence are shown as “—”; insertions are shown as lowercase letters.

| | dgRNA | | | |
|---|---|---|---|---|
| Experiment | targeting | | % of all | Indel |
| Number | domain | Variant Read (Genomic Sequence) | reads | Length |
| 1 | CR001028 | TTCTGTCATGTGTGTCTTGACTCAGAAACCCTGTTCTCCTCTA- | 13.26% | −1 |
| | | ATATCTCCCCACCGCATCTCTTTCAGCAGTTGTTTC | | |
| 1 | CR001028 | TTCTGTCATGTGTGTCTTGACTCAGAAACCCTGTTCTCC------------- | 12.48% | −13 |
| | | CCACCGCATCTCTTTCAGCAGTTGTTTC | | |
| 1 | CR001028 | TTCTGTCATGTGTGTCTTGACTCAGAAACCCTGTTCTCCTCTA---- | 6.04% | −4 |
| | | TCTCCCCACCGCATCTCTTTCAGCAGTTGTTTC | | |
| 1 | CR001028 | TTCTGTCATGTGTGTCTTGACTCAGAAACCCTGTTCTCCTCTA-- | 3.94% | −2 |
| | | TATCTCCCCACCGCATCTCTTTCAGCAGTTGTTTC | | |
| 1 | CR001028 | TTCTGTCATGTGTGTCTTGACTCAGAAACCCTGTTCTCCTC------------- | 3.65% | −13 |
| | | ACCGCATCTCTTTCAGCAGTTGTTTC | | |
| 1 | CR001028 | | . . . | . . . |
| 2 | CR001028 | TTCTGTCATGTGTGTCTTGACTCAGAAACCCTGTTCTCC------------- | 14.30% | −13 |
| | | CCACCGCATCTCTTTCAGCAGTTGTTTC | | |
| 2 | CR001028 | TTCTGTCATGTGTGTCTTGACTCAGAAACCCTGTTCTCCTCTA- | 11.51% | −1 |
| | | ATATCTCCCCACCGCATCTCTTTCAGCAGTTGTTTC | | |
| 2 | CR001028 | TTCTGTCATGTGTGTCTTGACTCAGAAACCCTGTTCTCCTCTA-- | 5.63% | −2 |
| | | TATCTCCCCACCGCATCTCTTTCAGCAGTTGTTTC | | |
| 2 | CR001028 | TTCTGTCATGTGTGTCTTGACTCAGAAACCCTGTTCTCCTCTA---- | 4.98% | −4 |
| | | TCTCCCCACCGCATCTCTTTCAGCAGTTGTTTC | | |
| 2 | CR001028 | TTCTGTCATGTGTGTCTTGACTCAGAAACCCTGTTCTCCTC------------- | 4.91% | −13 |
| | | ACCGCATCTCTTTCAGCAGTTGTTTC | | |
| 2 | CR001028 | | . . . | . . . |
| 1 | CR001030 | TCTTGACTCAGAAACCCTGTTCTCCTCTACATATCTC------------- | 9.10% | −13 |
| | | TTTCAGCAGTTGTTTCTAAAAATATCCTCC | | |
| 1 | CR001030 | TCTTGACTCAGAAACCCTGTTCTCCTCTACATATCTCCCCACC- | 4.77% | −1 |
| | | CATCTCTTTCAGCAGTTGTTTCTAAAAATATCCTCC | | |
| 1 | CR001030 | TCTTGACTCAGAAACCCTGTTCTCCTCTACATATCTCCCCACC-- | 3.54% | −2 |
| | | ATCTCTTTCAGCAGTTGTTTCTAAAAATATCCTCC | | |
| 1 | CR001030 | TCTTGACTCAGAAACCCTGTTCTCCTCTACATATCTCCCCACCGgCATCTCTTTCA | 2.51% | 1 |
| | | GCAGTTGTTTCTAAAAATATCCTCC | | |
| 1 | CR001030 | TCTTGACTCAGAAACCCTGTTCTCCTCTACATATCTCCCCA----- | 2.39% | −5 |
| | | TCTCTTTCAGCAGTTGTTTCTAAAAATATCCTCC | | |
| 1 | CR001030 | | . . . | . . . |
| 2 | CR001030 | TCTTGACTCAGAAACCCTGTTCTCCTCTACATATCTC------------- | 9.67% | −13 |
| | | TTTCAGCAGTTGTTTCTAAAAATATCCTCC | | |
| 2 | CR001030 | TCTTGACTCAGAAACCCTGTTCTCCTCTACATATCTCCCCACC- | 4.87% | −1 |
| | | CATCTCTTTCAGCAGTTGTTTCTAAAAATATCCTCC | | |
| 2 | CR001030 | TCTTGACTCAGAAACCCTGTTCTCCTCTACATATCTCCCCACC-- | 3.33% | −2 |
| | | ATCTCTTTCAGCAGTTGTTTCTAAAAATATCCTCC | | |
| 2 | CR001030 | TCTTGACTCAGAAACCCTGTTCTCCTCTACATATCTCCCCACCGgCATCTCTTTCA | 2.93% | 1 |
| | | GCAGTTGTTTCTAAAAATATCCTCC | | |
| 2 | CR001030 | TCTTGACTCAGAAACCCTGTTCTCCTCTACATATCTCCCCAC- | 1.85% | −1 |
| | | GCATCTCTTTCAGCAGTTGTTTCTAAAAATATCCTCC | | |
| 2 | CR001030 | | . . . | . . . |
| 1 | CR001036 | CCTAGTTTCATTTTTGCAGAAGTGTTTTAGGCTAAT- | 19.08% | −1 |
| | | TAGTGGAATGTATCTTAGAGTTTAACTTATTTGTTTCTGTCAC | | |
| 1 | CR001036 | CCTAGTTTCATTTTTGCAGAAGTGTTTTAGGCTAATA-- | 17.13% | −2 |
| | | GTGGAATGTATCTTAGAGTTTAACTTATTTGTTTCTGTCAC | | |
| 1 | CR001036 | CCTAGTTTCATTTTTGCAGAAGTGTTTTAG---------- | 3.55% | −10 |
| | | TGGAATGTATCTTAGAGTTTAACTTATTTGTTTCTGTCAC | | |
| 1 | CR001036 | CCTAGTTTCATTTTTGCAGAAGTGTTTTAGGCTAATAaTAGTGGAATGTATCTTAG | 2.42% | 1 |
| | | AGTTTAACTTATTTGTTTCTGTCAC | | |
| 1 | CR001036 | CCTAGTTTCATTTTTGCAGAAGTGTTTTAGGCTAATA- | 2.38% | −1 |
| | | AGTGGAATGTATCTTAGAGTTTAACTTATTTGTTTCTGTCAC | | |
| 1 | CR001036 | | . . . | . . . |
| 2 | CR001036 | CCTAGTTTCATTTTTGCAGAAGTGTTTTAGGCTAATA-- | 22.26% | −2 |
| | | GTGGAATGTATCTTAGAGTTTAACTTATTTGTTTCTGTCAC | | |
| 2 | CR001036 | CCTAGTTTCATTTTTGCAGAAGTGTTTTAGGCTAAT- | 19.77% | −1 |
| | | TAGTGGAATGTATCTTAGAGTTTAACTTATTTGTTTCTGTCAC | | |
| 2 | CR001036 | CCTAGTTTCATTTTTGCAGAAGTGTTTTAG---------- | 6.25% | −10 |
| | | TGGAATGTATCTTAGAGTTTAACTTATTTGTTTCTGTCAC | | |
| 2 | CR001036 | CCTAGTTTCATTTTTGCAGAAGTGTTTTAGGCTAATA- | 1.96% | −1 |
| | | AGTGGAATGTATCTTAGAGTTTAACTTATTTGTTTCTGTCAC | | |
| 2 | CR001036 | CCTAGTTTCATTTTTGCAGAAGTGTTTTAGG------------ | 1.41% | −12 |
| | | AATGTATCTTAGAGTTTAACTTATTTGTTTCTGTCAC | | |
| 2 | CR001036 | | . . . | . . . |
| 1 | CR001043 | TAGAGATTTTTGTCTCCAAGGGAATTTTGAGAGGTTG- | 5.28% | −1 |
| | | AATGGACAAATCTATTGCTGCAGTTTAAACTTGCTTGCTTCC | | |
| 1 | CR001043 | TAGAGATTTTTGTCTCCAAGGGAATTTTGAGAGGTTGGA----- | 2.67% | −5 |
| | | CAAATCTATTGCTGCAGTTTAAACTTGCTTGCTTCC | | |
| 1 | CR001043 | TAGAGATTTTTGTCTCCAAGGGAATTTTGA--------- | 2.62% | −9 |
| | | ATGGACAAATCTATTGCTGCAGTTTAAACTTGCTTGCTTCC | | |
| 1 | CR001043 | TAGAGATTTTTGTCTCCAAGGGAATTTTGAGAGG--------- | 2.22% | −9 |
| | | ACAAATCTATTGCTGCAGTTTAAACTTGCTTGCTTCC | | |
| 1 | CR001043 | TAGAGATTTTTGTCTCCAAGGGAATTTTGAGAGGTTGGgAATGGACAAATCTATTG | 2.06% | 1 |
| | | CTGCAGTTTAAACTTGCTTGCTTCC | | |
| 1 | CR001043 | | . . . | . . . |
| 2 | CR001043 | TAGAGATTTTTGTCTCCAAGGGAATTTTGAGAGGTTG- | 5.87% | −1 |
| | | AATGGACAAATCTATTGCTGCAGTTTAAACTTGCTTGCTTCC | | |
| 2 | CR001043 | TAGAGATTTTTGTCTCCAAGGGAATTTTGAGAGG--------- | 3.11% | −9 |
| | | ACAAATCTATTGCTGCAGTTTAAACTTGCTTGCTTCC | | |
| 2 | CR001043 | TAGAGATTTTTGTCTCCAAGGGAATTTTGAGAGGTTGGA----- | 2.42% | −5 |
| | | CAAATCTATTGCTGCAGTTTAAACTTGCTTGCTTCC | | |
| 2 | CR001043 | TAGAGATTTTTGTCTCCAAGGGAATTTTGAGAGGTTGGgAATGGACAAATCTATTG | 1.90% | 1 |
| | | CTGCAGTTTAAACTTGCTTGCTTCC | | |
| 2 | CR001043 | TAGAGATTTTTGTCTCCAAGGGAATTTTGA--------- | 1.72% | −9 |
| | | ATGGACAAATCTATTGCTGCAGTTTAAACTTGCTTGCTTCC | | |
| 2 | CR001043 | | . . . | . . . |
| 1 | CR001080 | GAGAAAGGAAGGAAGGAAGAGGGGAAGAGAGAGGATG- | 2.72% | −1 |
| | | AAGGGATGGAGGAGAAGAAGGAAAAATAAATAATGGAGAGGA | | |
| 1 | CR001080 | GAGAAAGGAAGGAAGGAAGAGGGGAAGAGAGAGGATGGA--------- | 2.22% | −9 |
| | | GGAGAAGAAGGAAAAATAAATAATGGAGAGGA | | |
| 1 | CR001080 | GAGAAAGGAAGGAAGGAAGAGGGGAAGAGAGAGG-------- | 1.44% | −8 |
| | | GATGGAGGAGAAGAAGGAAAAATAAATAATGGAGAGGA | | |
| 1 | CR001080 | GAGAAAGGAAGGAAGGAAGAGGGGAAGAGAGAGGATGGgAAGGGATGGAGGAGAAG | 1.41% | 1 |
| | | AAGGAAAAATAAATAATGGAGAGGA | | |
| 1 | CR001080 | GAGAAAGGAAGGAAGGAAGAGGGGAAGAGAGAGGA---- | 1.11% | −4 |
| | | AGGGATGGAGGAGAAGAAGGAAAAATAAATAATGGAGAGGA | | |
| 1 | CR001080 | | . . . | . . . |
| 2 | CR001080 | GAGAAAGGAAGGAAGGAAGAGGGGAAGAGAGAGGATGGA--------- | 3.43% | −9 |
| | | GGAGAAGAAGGAAAAATAAATAATGGAGAGGA | | |
| 2 | CR001080 | GAGAAAGGAAGGAAGGAAGAGGGGAAGAGAGAGGATG- | 3.17% | −1 |
| | | AAGGGATGGAGGAGAAGAAGGAAAAATAAATAATGGAGAGGA | | |
| 2 | CR001080 | GAGAAAGGAAGGAAGGAAGAGGGGAAGAGA--------- | 1.61% | −9 |
| | | AGGGATGGAGGAGAAGAAGGAAAAATAAATAATGGAGAGGA | | |
| 2 | CR001080 | GAGAAAGGAAGGAAGGAAGAGGGGAAGAGAGAGGA---- | 1.28% | −4 |
| | | AGGGATGGAGGAGAAGAAGGAAAAATAAATAATGGAGAGGA | | |
| 2 | CR001080 | GAGAAAGGAAGGAAGGAAGAGGGGAAGAGAGAGG-------- | 1.16% | −8 |
| | | GATGGAGGAGAAGAAGGAAAAATAAATAATGGAGAGGA | | |
| 2 | CR001080 | | . . . | . . . |
| 1 | CR001095 | GAGAAAGAGAAAGGGAAGGGAAGAGAGGAAAGAAGA-- | 5.94% | −2 |
| | | AGAGGAGAGAAAAGAAACGAAGAGAGGGGAAGGGAAGGAAAA | | |
| 1 | CR001095 | GAGAAAGAGAAAGGGAAGGGAAGAGAGGAAAGAAGAG----- | 5.54% | −5 |
| | | GAGAGAAAAGAAACGAAGAGAGGGGAAGGGAAGGAAAA | | |
| 1 | CR001095 | GAGAAAGAGAAAGGGAAGGGAAGAGAGGA--------------- | 4.02% | −15 |
| | | GAGAAAAGAAACGAAGAGAGGGGAAGGGAAGGAAAA | | |
| 1 | CR001095 | GAGAAAGAGAAAGGGAAGGGAAGAGAGGAAAGAA-------------------- | 3.23% | −20 |
| | | ACGAAGAGAGGGGAAGGGAAGGAAAA | | |
| 1 | CR001095 | GAGAAAGAGAAAGGGAAGGGAAGAGAGGAAAGA-------- | 2.49% | −8 |
| | | GGAGAGAAAAGAAACGAAGAGAGGGGAAGGGAAGGAAAA | | |
| 1 | CR001095 | | . . . | . . . |
| 2 | CR001095 | GAGAAAGAGAAAGGGAAGGGAAGAGAGGAAAGAAGAG----- | 7.89% | −5 |
| | | GAGAGAAAAGAAACGAAGAGAGGGGAAGGGAAGGAAAA | | |
| 2 | CR001095 | GAGAAAGAGAAAGGGAAGGGAAGAGAGGAAAGAAGA-- | 6.18% | −2 |
| | | AGAGGAGAGAAAAGAAACGAAGAGAGGGGAAGGGAAGGAAAA | | |
| 2 | CR001095 | GAGAAAGAGAAAGGGAAGGGAAGAGAGGA--------------- | 4.16% | −15 |
| | | GAGAAAAGAAACGAAGAGAGGGGAAGGGAAGGAAAA | | |
| 2 | CR001095 | GAGAAAGAGAAAGGGAAGGGAAGAGAGGAAAGAAGAGgAAGAGGAGAGAAAAGAAA | 2.77% | 1 |
| | | CGAAGAGAGGGGAAGGGAAGGAAAA | | |
| 2 | CR001095 | GAGAAAGAGAAAGGGAAGGGA-------------------- | 1.98% | −20 |
| | | GGAGAGAAAAGAAACGAAGAGAGGGGAAGGGAAGGAAAA | | |
| 2 | CR001095 | | . . . | . . . |
| 1 | CR001137 | AAATGCTTATGACAGCAATAATCATAAAAACCTCAAACC------- | 6.73% | −7 |
| | | ACTTAAATGCTTACCAACAGTAGAATTGATAAAT | | |
| 1 | CR001137 | AAATGCTTATGACAGCAATAATCATAAAAACCTCAAACCGGTAGgCCACTTAAATG | 4.02% | 1 |
| | | CTTACCAACAGTAGAATTGATAAAT | | |
| 1 | CR001137 | AAATGCTTATGACAGCAATAATCATAAAAACCTCAAACCGGTAaGCCACTTAAATG | 2.87% | 1 |
| | | CTTACCAACAGTAGAATTGATAAAT | | |
| 1 | CR001137 | AAATGCTTATGACAGCAATAATCATAAAAACCTCA-------- | 1.71% | −8 |
| | | GCCACTTAAATGCTTACCAACAGTAGAATTGATAAAT | | |
| 1 | CR001137 | AAATGCTTATGACAGCAATAATCATAAAAACC-------------- | 0.95% | −14 |
| | | ACTTAAATGCTTACCAACAGTAGAATTGATAAAT | | |
| 1 | CR001137 | | . . . | . . . |
| 2 | CR001137 | AAATGCTTATGACAGCAATAATCATAAAAACCTCAAACC------- | 7.25% | −7 |
| | | ACTTAAATGCTTACCAACAGTAGAATTGATAAAT | | |
| 2 | CR001137 | AAATGCTTATGACAGCAATAATCATAAAAACCTCAAACCGGTAGgCCACTTAAATG | 3.44% | 1 |
| | | CTTACCAACAGTAGAATTGATAAAT | | |
| 2 | CR001137 | AAATGCTTATGACAGCAATAATCATAAAAACCTCAAACCGGTAaGCCACTTAAATG | 2.50% | 1 |
| | | CTTACCAACAGTAGAATTGATAAAT | | |
| 2 | CR001137 | AAATGCTTATGACAGCAATAATCATAAAAACCTCAAACCGGTA-------- | 1.37% | −8 |
| | | AATGCTTACCAACAGTAGAATTGATAAAT | | |
| 2 | CR001137 | AAATGCTTATGACAGCAATAATCATAAAAACCTCAAACCGGT------- | 1.11% | −7 |
| | | TAAATGCTTACCAACAGTAGAATTGATAAAT | | |
| 2 | CR001137 | | . . . | . . . |
| 1 | CR001142 | AAATGCATTTTACAGCATTTGGTTGATTAAAAGTAACCcAGAGGTGAGTTCAAACT | 8.00% | 1 |
| | | ATATGACTTTATTTGTATATAGAAA | | |
| 1 | CR001142 | AAATGCATTTTACAGCATTTGGTTGATTAAAAG------- | 6.63% | −7 |
| | | AGGTGAGTTCAAACTATATGACTTTATTTGTATATAGAAA | | |
| 1 | CR001142 | AAATGCATTTTACAGCATTTGGTTGATTAAAAGTAAC- | 2.86% | −1 |
| | | AGAGGTGAGTTCAAACTATATGACTTTATTTGTATATAGAAA | | |
| 1 | CR001142 | AAATGCATTTTACAGCATTTGGTTGATTAAAAG--------- | 2.03% | −9 |
| | | GTGAGTTCAAACTATATGACTTTATTTGTATATAGAAA | | |
| 1 | CR001142 | AAATGCATTTTACAGCATTTGGTTGA-------------------- | 1.71% | −20 |
| | | GTTCAAACTATATGACTTTATTTGTATATAGAAA | | |
| 1 | CR001142 | | . . . | . . . |
| 2 | CR001142 | AAATGCATTTTACAGCATTTGGTTGATTAAAAGTAACCcAGAGGTGAGTTCAAACT | 9.94% | 1 |
| | | ATATGACTTTATTTGTATATAGAAA | | |
| 2 | CR001142 | AAATGCATTTTACAGCATTTGGTTGATTAAAAG------- | 5.81% | −7 |
| | | AGGTGAGTTCAAACTATATGACTTTATTTGTATATAGAAA | | |
| 2 | CR001142 | AAATGCATTTTACAGCATTTGGTTGATTAAAAGTAAC- | 4.19% | −1 |
| | | AGAGGTGAGTTCAAACTATATGACTTTATTTGTATATAGAAA | | |
| 2 | CR001142 | AAATGCATTTTACAGCATTTGGTTGATTAAAAG--------- | 2.59% | −9 |
| | | GTGAGTTCAAACTATATGACTTTATTTGTATATAGAAA | | |
| 2 | CR001142 | AAATGCATTTTACAGCATTTGGTTGA-------------------- | 2.26% | −20 |
| | | GTTCAAACTATATGACTTTATTTGTATATAGAAA | | |
| 2 | CR001142 | | . . . | . . . |
| 1 | CR001158 | CCTGGAAGCCAACGAAAGATATTGAATAATTCAAGAAAaGGTGGTGGCATGGTTTG | 10.94% | 1 |
| | | ATTTGTGTCTTTAAAAGATTATTCT | | |
| 1 | CR001158 | CCTGGAAGCCAACGAAAGATATTGAATAATTCAAG---- | 10.03% | −4 |
| | | GTGGTGGCATGGTTTGATTTGTGTCTTTAAAAGATTATTCT | | |
| 1 | CR001158 | CCTGGAAGCCAACGAAAGATATTGAATAATTCAAGAA- | 3.80% | −1 |
| | | GGTGGTGGCATGGTTTGATTTGTGTCTTTAAAAGATTATTCT | | |
| 1 | CR001158 | CCTGGAAGCCAACGAAAGATATTGAATAATTCAAGA-- | 1.19% | −2 |
| | | GGTGGTGGCATGGTTTGATTTGTGTCTTTAAAAGATTATTCT | | |
| 1 | CR001158 | CCTGGAAGCCAACGAAAGATATTGAATAATTCA----- | 0.78% | −5 |
| | | GGTGGTGGCATGGTTTGATTTGTGTCTTTAAAAGATTATTCT | | |
| 1 | CR001158 | | . . . | . . . |
| 2 | CR001158 | CCTGGAAGCCAACGAAAGATATTGAATAATTCAAGAAAaGGTGGTGGCATGGTTTG | 11.89% | 1 |
| | | ATTTGTGTCTTTAAAAGATTATTCT | | |
| 2 | CR001158 | CCTGGAAGCCAACGAAAGATATTGAATAATTCAAG---- | 9.97% | −4 |
| | | GTGGTGGCATGGTTTGATTTGTGTCTTTAAAAGATTATTCT | | |
| 2 | CR001158 | CCTGGAAGCCAACGAAAGATATTGAATAATTCAAGAA- | 3.45% | −1 |
| | | GGTGGTGGCATGGTTTGATTTGTGTCTTTAAAAGATTATTCT | | |
| 2 | CR001158 | CCTGGAAGCCAACGAAAGATATTGAATAATTCAAGA-- | 0.86% | −2 |
| | | GGTGGTGGCATGGTTTGATTTGTGTCTTTAAAAGATTATTCT | | |
| 2 | CR001158 | CCTGGAAGCCAACGAAAGATATTGAATAATTCAAGAAcaAGGTGGTGGCATGGTTT | 0.49% | 2 |
| | | GATTTGTGTCTTTAAAAGATTATTCT | | |
| 2 | CR001158 | | . . . | . . . |
| 1 | CR001212 | CCTTGGCCTCCCAAAGTGCTGGGTTTACAAGCCTGAGCCA------------- | 11.38% | −13 |
| | | GGATAAGGTCTAAAAGTGGAAAGAATA | | |
| 1 | CR001212 | CCTTGGCCTCCCAAAGTGCTGGGTTTACAAGCCTGAGCCACC- | 3.98% | −1 |
| | | CATCCAGCCAGGATAAGGTCTAAAAGTGGAAAGAATA | | |
| 1 | CR001212 | CCTTGGCCTCCCAAAGTGCTGGGTTTACAAGCCTGAGCCA----- | 3.05% | −5 |
| | | TCCAGCCAGGATAAGGTCTAAAAGTGGAAAGAATA | | |
| 1 | CR001212 | CCTTGGCCTCCCAAAGTGCTGGGTTTACAAGCCTGAGCCACCG- | 2.94% | −1 |
| | | ATCCAGCCAGGATAAGGTCTAAAAGTGGAAAGAATA | | |
| 1 | CR001212 | CCTTGGCCTCCCAAAGTGCTGGGTTTACAAGCCTGAGCCACC------ | 2.82% | −6 |
| | | AGCCAGGATAAGGTCTAAAAGTGGAAAGAATA | | |
| 1 | CR001212 | | . . . | . . . |
| 2 | CR001212 | CCTTGGCCTCCCAAAGTGCTGGGTTTACAAGCCTGAGCCA------------- | 11.42% | −13 |
| | | GGATAAGGTCTAAAAGTGGAAAGAATA | | |
| 2 | CR001212 | CCTTGGCCTCCCAAAGTGCTGGGTTTACAAGCCTGAGCCACC- | 6.41% | −1 |
| | | CATCCAGCCAGGATAAGGTCTAAAAGTGGAAAGAATA | | |
| 2 | CR001212 | CCTTGGCCTCCCAAAGTGCTGGGTTTACAAGCCTGAGCCACCG- | 5.61% | −1 |
| | | ATCCAGCCAGGATAAGGTCTAAAAGTGGAAAGAATA | | |
| 2 | CR001212 | CCTTGGCCTCCCAAAGTGCTGGGTTTACAAGCCTGAGCCACCG-- | 2.85% | −2 |
| | | TCCAGCCAGGATAAGGTCTAAAAGTGGAAAGAATA | | |
| 2 | CR001212 | CCTTGGCCTCCCAAAGTGCTGGGTTTACAAGCCTGAGCCACC------ | 1.96% | −6 |
| | | AGCCAGGATAAGGTCTAAAAGTGGAAAGAATA | | |
| 2 | CR001212 | | . . . | . . . |
| 1 | CR001217 | AAGTGCTGGGTTTACAAGCCTGAGCCACCGCATCCAGCCAGG------ | 17.75% | −6 |
| | | TCTAAAAGTGGAAAGAATAGCATCTACTCTTG | | |
| 1 | CR001217 | AAGTGCTGGGTTTACAAGCCTGAGCCACCGCATCCAGCCAGGATtAAGGTCTAAAA | 4.06% | 1 |
| | | GTGGAAAGAATAGCATCTACTCTTG | | |
| 1 | CR001217 | AAGTGCTGGGTTTACAAGCCTGAGCCACCGCATCCAGCCAGGAaTAAGGTCTAAAA | 2.38% | 1 |
| | | GTGGAAAGAATAGCATCTACTCTTG | | |
| 1 | CR001217 | AAGTGCTGGGTTTACAAGCCTGAGCCACCGCATCCAGCCAGGA- | 1.35% | −1 |
| | | AAGGTCTAAAAGTGGAAAGAATAGCATCTACTCTTG | | |
| 1 | CR001217 | AAGTGCTGGGTTTACAAGCCTGAGCCACCGCATCCAGCCAGGAT----- | 1.10% | −5 |
| | | CTAAAAGTGGAAAGAATAGCATCTACTCTTG | | |
| 1 | CR001217 | | . . . | . . . |
| 2 | CR001217 | AAGTGCTGGGTTTACAAGCCTGAGCCACCGCATCCAGCCAGG------ | 18.91% | −6 |
| | | TCTAAAAGTGGAAAGAATAGCATCTACTCTTG | | |
| 2 | CR001217 | AAGTGCTGGGTTTACAAGCCTGAGCCACCGCATCCAGCCAGGATtAAGGTCTAAAA | 5.59% | 1 |
| | | GTGGAAAGAATAGCATCTACTCTTG | | |
| 2 | CR001217 | AAGTGCTGGGTTTACAAGCCTGAGCCACCGCATCCAGCCAGGAaTAAGGTCTAAAA | 1.42% | 1 |
| | | GTGGAAAGAATAGCATCTACTCTTG | | |
| 2 | CR001217 | AAGTGCTGGGTTTACAAGCCTGAGCCACCGCATCCAGCCAGGA- | 1.38% | −1 |
| | | AAGGTCTAAAAGTGGAAAGAATAGCATCTACTCTTG | | |
| 2 | CR001217 | AAGTGCTGGGTTTACAAGCCTGAGCCACCGCATCCAGCCAGGAT----- | 1.26% | −5 |
| | | CTAAAAGTGGAAAGAATAGCATCTACTCTTG | | |
| 2 | CR001217 | | . . . | . . . |
| 1 | CR001221 | TAGCATCTACTCTTGTTCAGGAAACAATGAGGACCTG---- | 28.78% | −4 |
| | | GGCAGTAAGAGTGGTGATTAATAGATAGGGACAAATTGA | | |
| 1 | CR001221 | TAGCATCTACTCTTGTTCAGGAAACAATGAGGACCT- | 9.51% | −1 |
| | | ACTGGGCAGTAAGAGTGGTGATTAATAGATAGGGACAAATTGA | | |
| 1 | CR001221 | TAGCATCTACTCTTGTTCAGGAAACAATGAGGAC----- | 4.35% | −5 |
| | | TGGGCAGTAAGAGTGGTGATTAATAGATAGGGACAAATTGA | | |
| 1 | CR001221 | TAGCATCTACTCTTGTTCAGGAAACAATGAGG----------- | 1.87% | −11 |
| | | CAGTAAGAGTGGTGATTAATAGATAGGGACAAATTGA | | |
| 1 | CR001221 | TAGCATCTACTCTTGTTCAGGAAACAATG------------ | 1.71% | −12 |
| | | GGCAGTAAGAGTGGTGATTAATAGATAGGGACAAATTGA | | |
| 1 | CR001221 | | . . . | . . . |
| 2 | CR001221 | TAGCATCTACTCTTGTTCAGGAAACAATGAGGACCTG---- | 29.12% | −4 |
| | | GGCAGTAAGAGTGGTGATTAATAGATAGGGACAAATTGA | | |
| 2 | CR001221 | TAGCATCTACTCTTGTTCAGGAAACAATGAGGACCT- | 10.32% | −1 |
| | | ACTGGGCAGTAAGAGTGGTGATTAATAGATAGGGACAAATTGA | | |
| 2 | CR001221 | TAGCATCTACTCTTGTTCAGGAAACAATGAGGAC----- | 4.26% | −5 |
| | | TGGGCAGTAAGAGTGGTGATTAATAGATAGGGACAAATTGA | | |
| 2 | CR001221 | TAGCATCTACTCTTGTTCAGGAAACAATGAGGAC---------- | 1.89% | −10 |
| | | AGTAAGAGTGGTGATTAATAGATAGGGACAAATTGA | | |
| 2 | CR001221 | TAGCATCTACTCTTGTTCAGGAAACAATGAGG----------- | 1.67% | −11 |
| | | CAGTAAGAGTGGTGATTAATAGATAGGGACAAATTGA | | |
| 2 | CR001221 | | . . . | . . . |

[1001] Although in some cases, the relative abundance of the most frequent indels varied from experiment to experiment, the top indels were largely the same across both experiments for any given gRNA. This indicates that for these dgRNAs, the indel pattern created in HSC cells was consistent. As well, these results support the surprising finding from earlier experiments that small indels (e.g., in this case, indels from 1-20 nucleotides) in the HPFH regions targeted by these gRNAs could result in significant upregulation of fetal hemoglobin. An increase in HbF-containing erythrocytes derived from genome edited cells is likely to have therapeutic implications by reduced sickling.

### Example 4.5

[1002] Methods: Methods are as in sub-example 4.1, with the following exceptions.

[1003] Human CD34⁺ cell culture. Human CD34+ cells were derived from bone marrow (Hemacare Corporation, Cat. No. BM34C-3). CD34+ cells were thawed and expanded in expansion medium for 1 day prior to RNP delivery. After RNP delivery, cells were immediately transferred back into 200 μl expansion medium and allowed to recover overnight. The following day, the cultures were counted and adjusted to 2.0×10⁵ viable cells per ml. Percent recovery was calculated as the viable cell count 1 day after RNP delivery as a percentage of the viable cells electroporated. After an additional 7 days in expansion medium (8 days following RNP delivery), the viable cell count was again determined. Fold proliferation was calculated as the viable cell count after 7 days in expansion medium divided by 2.0×10⁵ cells per ml. All viable cell counts were measured by flow cytometry using AccuCheck Counting Beads (ThermoFisher cat. No. PCB100) with inviable cells discriminated by DAPI (4′,6-Diamidino-2-Phenylindole) staining. After an additional 1 day in expansion medium (9 days following RNP delivery), the cell cultures were phenotyped by flow cytometry as described under Cell phenotyping.

[1004] Assembly of Cas9 and guide RNA ribonucleoprotein (RNP) complexes, preparation of HSPC, and electroporation of RNP into HSPC. The HSPC collected by centrifugation were resuspended in P3 Primary Cell Solution (Lonza cat. No. PBP3-00675) at a cell density of 5.4×10⁶/mL. The RNP was mixed with 20 μL of cells by pipetting up and down and incubated at RT for 2 min. The RNP/cell mixture (20 μL) was electroporated using code CM-137 on the 4D-Nucleofector (Lonza). Electroporations were performed in duplicate. The crRNAs used were of the sequence mN*mN*mN*rNrNrNrNrNrNrNrNrNrNrNrNrNrNrNrNrNrGrUrUrUrUrArGrArGrCrUrArU*mG*mC*mU (SEQ ID NO: 7832), where r indicates an RNA base, m indicates a base with 2′O-Methyl modification, and * indicates a Phosphorothioate Bond. N's indicate the residues of the indicated targeting domain. The tracr sequence used was SEQ ID NO: 7808.

[1005] Colony forming unit cell assay. The day following RNP delivery, viable cells were counted as described in Human CD34+ cell culture. For the granulocyte/macrophage progenitor colony forming unit (CFU) assay, 227 cells per 1 mL Methocult H4035 methylcellulose medium (StemCell Technologies) was plated in duplicate. 1× antibiotic/antimycotic (Gibco, Cat. #10378-016) was added into the Methocult. The culture dishes were incubated in a humidified incubator at 37° C. Colonies containing at least 50 cells were counted at day 15 post-plating. Colony number per ml of Methocult was divided by 227 and multiplied by 1000 to obtain the CFU frequency per 1000 cells.

[1006] Cell phenotyping. Cells were analyzed for surface marker expression after staining with the following antibody panels. Panel 1: Antibodies specific for CD38 (FITC-conjugate, BD Biosciences #340926, clone HB7), CD133 epitope 1 (PE-conjugate, Miltenyi #130-080-801, clone AC133), CD34 (PerCP-conjugate, BD Biosciences #340666, clone 8G12), CD90 (APC-conjugate, BD Biosciences #598695, clone E10), CD45RA (Pe-Cy7-conjugate, eBioscience #25-0458-42, clone HI100). Panel 2: CD34 (PerCP-conjugate, BD Biosciences #340666, clone 8G12), CD33 (PE-Cy7-conjugate, BD Biosciences #333946, clone P67.6), CD14 (APC-H7-conjugate, BD Biosciences #560270, clone MφP9), CD15 (PE-conjugate, Biolegend #301905, clone HI98). Panel 3: CD34 (PerCP-conjugate, BD Biosciences #340666, clone 8G12), CD41a (APC-H7-conjugate, BD Biosciences #561422, clone HIP8), CD71 (FITC-conjugate, BD Biosciences #555536, clone M-A712), CD19 (PE-conjugate, BD Biosciences #340720, clone SJ25C1), CD56 (APC-conjugate, Biolegend #318310, clone HCD56). Corresponding isotype control antibody panels were used to stain cultures in parallel, except that anti-CD45RA was included instead of its isotype control. Inviable cells were discriminated by DAPI (4′,6-Diamidino-2-Phenylindole) staining. Stained samples were analyzed on an LSRFortessa flow cytometer (BD Biosciences) for cell surface protein expression. The results were analyzed using Flowjo, and data were presented as % of the DAPI negative viable cell population.

[1007] Genomic DNA preparation and next generation sequencing (NGS). Genomic DNA was prepared from edited and unedited HSPC at 1 and 8 days post-electroporation using Quick Extract DNA Extraction Solution (Epicentre Cat #QE09050).

[1008] Results:

[1009] Without being bound by theory, it is believed that targeted genetic disruption of the HPFH or BCL11A erythroid enhancer region will relieve repression of γ-globin expression, allowing production of the red blood cells containing elevated HbF protein, (cells expressing fetal hemoglobin are sometimes referred to herein as “F-cells”). The elevated HbF prevents sickling of the red blood cells under deoxygenated conditions and will be therapeutic/curative for the patients of both β-thalassemia and SCD. Autologous hematopoietic stem cell transplantation (HSCT) with ex vivo genome edited HSC from SCD patients was also combined with stem cell expansion enhancing technology, e.g., an aryl hydrocarbon receptor (AHR) inhibitor, e.g., as described in WO2010/059401 (the contents of which are incorporated by reference in their entirety), e.g., Compound 4 to improve ex vivo expansion and increase the dose of gene modified HSC delivered.

[1010] For efficient genome editing via programmable nuclease, Cas9, the successful delivery of guide RNA (gRNA) and Cas9 protein into target cells and tissues is essential. Recent reports demonstrated that Cas9 ribonucleoprotein (RNP) complexes when delivered into target cells by electroporation can accomplish efficient and specific genome editing in several different cell types. Cas9-RNP complexes cleave chromosomal DNA almost immediately after delivery and are degraded rapidly in cells, reducing off-target effects. In contrast, use of plasmid and viral vector systems used to deliver Cas9 results in prolonged expression of the enzyme aggravating off-target effects associated with the system. Additionally, delivery of RNPs into the target cells requires no additional tools which would greatly facilitate translation of genome editing for therapeutic purposes in the clinic. Purified recombinant Cas9 protein and gRNA complexes (RNPs) were delivered into cultured HSPC and an overview experiments used are shown in FIG. 17.

[1011] Recombinant Cas9 protein was purified from Escherichia coli and complexed with synthetic dual gRNAs (dgRNA) that consist of crRNA and tracr to generate ribonucleoprotein (RNP) complexes. The list of gRNAs used in the study are shown in Table 23. The RNP complexes were electroporated into CD34+ HSPC via electroporation as described under materials and methods. The cells were expanded prior to the delivery of RNP complexes. Actively dividing cells may facilitate uptake of RNP complexes delivered by electroporation.

TABLE 23
Relative viable cell recovery, proliferation in CD34+ medium, and
granulocyte/macrophage progenitor colony forming unit (CFU) frequency
for edited and unedited cell cultures in the current study. Percent
recovery, Fold proliferation and CFU frequency were calculated as
described in Materials and Methods. Individual electroporation replicates
are shown. All gRNA molecules were tested in the dgRNA format. The
Tracr sequence was SEQ ID NO: 7808, and the crRNA had the following
format with 2′O-Methyl (m) and Phosphorothioate Bond (*)
modifications indicated: mN*mN*mN*rNrNrNrNrNrNrNrNrNrNrNrNr-
NrNrNrNrNrGrUrUrUrUrArGrArGrCrUrArU*mG*m C*mU
(SEQ ID NO: 7832), where N's
are the residues of the indicated targeting domain

| | | Fold | |
|---|---|---|---|
| Guide RNA targeting | % | proliferation | CFU (per |
| domain ID and replicate | recovery | (7 days) | 1000 cells) |
| CR001030 replicate 1 | 77.7 | 7.1 | 117 |
| CR001030 replicate 2 | 87.9 | 4.8 | 95 |
| CR001028 replicate 1 | 85.3 | 10.6 | 176 |
| CR001028 replicate 2 | 82.1 | 10.9 | 141 |
| CR001095 replicate 1 | 72.5 | 7.3 | 121 |
| CR001095 replicate 2 | 73.3 | 7.3 | 126 |
| CR001212 replicate 1 | 75.6 | 7.7 | 123 |
| CR001212 replicate 2 | 75.5 | 8.2 | 97 |
| CR000312 replicate 1 | 77.7 | 12.2 | 145 |
| CR000312 replicate 2 | 81.0 | 9.0 | 143 |
| g8 replicate 1 | 80.0 | 16.6 | 145 |
| g8 replicate 2 | 84.6 | 17.3 | 145 |
| None/control replicate 1 | 89.8 | 19.3 | 185 |
| None/control replicate 2 | 81.2 | 20.5 | 154 |

[1012] Percent cell recovery at 1 day after electroporation ranged from 72.5% to 89.8% and was similar across conditions, including the unedited but electroporated control (Table 23). The genome edited and unedited HSPC were analyzed for proliferation in CD34+ cell expansion medium. Proliferation ranged from 4.8-fold to 17.3-fold over 7 days for edited cell cultures, and ranged from 19.3 to 20.5-fold for unedited cells (Table 22). Editing by dgRNAs in this study targeting the HPFH or BCL11A erythroid enhancer regions did not alter the composition of cell types in the culture compared to unedited control, as determined by surface marker expression, indicating that targeting these sites does not alter HSPC fate under these conditions (FIG. 26A-B). In contrast, editing with dgRNA targeting g8 in the BCL11A exon resulted in a modest reduction in proliferation but a marked shift in cell composition, specifically a decrease in the percentage of all CD34+ HSPC sub-types as well as of the CD71+ erythroid population and an increase in the percentage of CD14+ monocyte and CD15+ granulocyte populations (Table 23 and FIG. 26A-B). The frequency of granulocyte/macrophage progenitor colony forming units (CFU) was similar across edited cultures, with only a modest CFU reduction in edited cultures (ranging from 95 to 145 CFU per 1000 cells) compared with unedited cultures (154 to 185 CFU per 1000 cells), suggesting that granulocyte/macrophage progenitor function is not grossly altered by targeting these sites (Table 23).

### Example 4.6

[1013] Methods: Methods are as in Example 4, with the following exceptions.

[1014] Assembly of Cas9 and guide RNA ribonucleoprotein (RNP) complexes, preparation of HSPC, and electroporation of RNP into HSPC. In some instances, crRNAs containing two different targeting domains were delivered into the same cell culture. In these instances, the total RNP delivered to cells contained 6 μg of Cas9, 3 μg of crRNA and 3 μg of Tracr, as in sub-example 4.1; however, the two crRNAs containing 1.5 μg each were independently complexed Tracr/CAS9 mixtures containing 1.5 μg Tracr and 3 μg Cas9 and only combined when added to the cells. The HSPC collected by centrifugation were resuspended in P3 Primary Cell Solution (Lonza cat. No. PBP3-00675) at a cell density of 2.5×10⁶/mL. The RNP was mixed with 20 μL of cells by pipetting up and down and incubated at RT for 2 min. The RNP/cell mixture (20 μL) was electroporated using code CM-137 on the 4D-Nucleofector (Lonza). Electroporations were performed in duplicate. The dgRNA format used a tracr having SEQ ID NO: 7808, and a crRNA of the sequence mN*mN*mN*rNrNrNrNrNrNrNrNrNrNrNrNrNrNrNrNrNrGrUrUrUrUrArGrArGrCrUrArU*mG*mC*mU (SEQ ID NO: 7832), where r indicates an RNA base, m indicates a base with 2′O-Methyl modification, and * indicates a Phosphorothioate Bond, and N's indicate the residues of the indicated targeting domain.

[1015] In vitro erythropoiesis and FACS analysis for HbF containing erythroid cells. The cell culture was diluted in fresh medium after 3 days.

[1016] Genomic DNA preparation and next generation sequencing (NGS). Genomic DNA was prepared from edited and unedited HSPC at 3 days post-electroporation using Quick Extract DNA Extraction Solution (Epicentre Cat #QE09050).

[1017] Results:

[1018] Without being bound by theory, it is believed that targeted genetic disruption of the HPFH or BCL11A erythroid enhancer region will relieve repression of γ-globin expression, allowing production of the red blood cells containing elevated HbF protein, (cells expressing fetal hemoglobin are sometimes referred to herein as “F-cells”). The elevated HbF prevents sickling of the red blood cells under deoxygenated conditions and will be therapeutic/curative for the patients of both β-thalassemia and SCD. Autologous hematopoietic stem cell transplantation (HSCT) with ex vivo genome edited HSC from SCD patients was also combined with stem cell expansion enhancing technology, e.g., an aryl hydrocarbon receptor (AHR) inhibitor, e.g., as described in WO2010/059401 (the contents of which are incorporated by reference in their entirety), e.g., Compound 4 to improve ex vivo expansion and increase the dose of gene modified HSC delivered.

[1019] For efficient genome editing via programmable nuclease, Cas9, the successful delivery of guide RNA (gRNA) and Cas9 protein into target cells and tissues is essential. Recent reports demonstrated that Cas9 ribonucleoprotein (RNP) complexes when delivered into target cells by electroporation can accomplish efficient and specific genome editing in several different cell types. Cas9-RNP complexes cleave chromosomal DNA almost immediately after delivery and are degraded rapidly in cells, reducing off-target effects. In contrast, use of plasmid and viral vector systems used to deliver Cas9 results in prolonged expression of the enzyme aggravating off-target effects associated with the system. Additionally, delivery of RNPs into the target cells requires no additional tools which would greatly facilitate translation of genome editing for therapeutic purposes in the clinic. Purified recombinant Cas9 protein and gRNA complexes (RNPs) were delivered into cultured HSPC and an overview experiments used are shown in FIG. 17.

[1020] Recombinant Cas9 protein was purified from Escherichia coli and complexed with synthetic dual gRNAs (dgRNA) that consist of crRNA and tracr to generate ribonucleoprotein (RNP) complexes. The list of gRNAs used in the study are shown in Table 24. The RNP complexes were electroporated into CD34+ HSPC via electroporation as described under materials and methods. The cells were expanded prior to the delivery of RNP complexes. Actively dividing cells may facilitate uptake of RNP complexes delivered by electroporation.

TABLE 24
HbF induction by simultaneous targeting of both the BCL11A erythroid
enhancer and HPFH regions. All gRNA molecules were tested in the
dgRNA format in duplicate. The tracr used has the sequence of SEQ
ID NO: 7808, and the crRNA had the following format with 2′O-Methyl
(m) and Phosphorothioate Bond (*) modifications indicated:
mN*mN*mN*rNrNrNrNrNrNrNrNrNrNrNrNrNrNrNrNrNrGrUrUr-
UrUrArGrArGrCrUrArU*mG*mC*mU (SEQ ID NO: 7832),
where N's are the residues of the indicated targeting domain.

| | Guide | | % edited at | % edited at |
|---|---|---|---|---|
| | RNA | % HbF+ | targeting | targeting |
| Guide RNA | targeting | (F cells), | site #1, | site #2, |
| targeting domain | domain | average of | average of | average of |
| ID #1 | ID #2 | replicates | replicates | replicates |
| CR000312 | n/a | 41.3 | 91.3 | n/a |
| CR001128_EH15 | n/a | 43.7 | 77.5 | n/a |
| n/a | CR001030 | 58.0 | n/a | 85.6 |
| n/a | CR001221 | 48.6 | n/a | 92.1 |
| CR000312 | CR001030 | 66.8 | 58.3 | 81.2 |
| CR000312 | CR001221 | 60.6 | 64.2 | 85.0 |
| CR001128_EH15 | CR001030 | 69.1 | 49.8 | 82.9 |
| CR001128_EH15 | CR001221 | 62.7 | 58.5 | 84.8 |
| g8 | n/a | 64.7 | 94.6 | n/a |
| None/control | n/a | 23.8 | n/a | n/a |

[1021] The genome edited and unedited HSPC were analyzed by flow cytometry for expression levels of fetal globin and two erythroid cell surface markers, transferrin receptor (CD71) and glycophorin A (CD235a) using antibodies conjugated to fluorescent dyes. The live cells were identified and gated by exclusion of Live Dead Violet. HPFH region or BCL11A erythroid enhancer targeting resulted in increased percentage of erythroid cells containing HbF compared to mock electroporated cells (Table 24). Induction of HbF positive cells by dgRNA including the targeting domain of g8 targeting exon 2 of BCL11A was also observed in parallel. When the HPFH region and BCL11A erythroid enhancer were targeted simultaneously in the same cell population, the percentage of HbF containing cells was increased beyond that of targeting either region independently (Table 24). Thus, an increase in HbF-containing erythrocytes derived from edited cells can be achieved by targeting either the HPFH region or BCL11A erythroid enhancer, as well as to a greater extent by simultaneous targeting of both regions.

[1022] Genomic PCR products of both regions were independently subjected to next generation sequencing (NGS) to determine the percentage of edited alleles in the cell population. Genome editing was observed in cell cultures electroporated with RNPs containing Cas9, crRNA of the given targeting domain and Tracr (Table 24), but not in control cells with no targeting domain delivered (RNPs containing only Cas9 and Tracr). When RNPs targeting two sites were delivered into the same cell population, editing at both sites was observed (Table 24). In some instances, the percent edited cells at a given site was modestly reduced when two RNPs were delivered compared with when only one RNP was delivered (Table 24), possibly due to the lower RNP concentration targeting a given site in the former instance. Higher editing percentages and potentially higher percentages of HbF containing cells may be achieved by increasing the each individual RNP concentration when two RNPs are delivered simultaneously. An increase in HbF-containing erythrocytes derived from genome edited cells is likely to have therapeutic implications by reduced sickling.

### Example 4.7

[1023] Methods: Methods are as in Example 4, with the following exceptions.

[1024] Human CD34+ cell culture. Human CD34+ cells were derived from bone marrow (Lonza, Cat. No. 2M-101D). CD34+ cells were thawed and expanded for 2 days in expansion medium prior to RNP delivery.

[1025] Assembly of Cas9 and guide RNA ribonucleoprotein (RNP) complexes, preparation of HSPC, and electroporation of RNP into HSPC. For formation of RNP using single guide RNAs (sgRNAs), 6 μg of sgRNA was added to 6 μg of CAS9 protein (in 0.8 to 1 μL) and 0.5 μL of 5×CCE buffer (20 mM HEPES, 100 mM KCL, 5 mM MgCL2, 5% Glycerol and freshly added 1 mM DTT) in a total volume of 5 μL and incubated for 5 min at 37° C. The HSPC were collected by centrifugation were resuspended in P3 Primary Cell Solution (Lonza cat. No. PBP3-00675) at a cell density of 6.4×106/mL. The RNP was mixed with 20 μL of cells by pipetting up and down and incubated at RT for 2 min. The RNP/cell mixture (20 μL) was electroporated using code CM-137 on the 4D-Nucleofector (Lonza). Electroporations were performed in duplicate. For dgRNA, dgRNA-PS and dgRNA-OMePS the Tracr was SEQ ID NO: 6660, with the exception of g8 which was used with Tracr SEQ ID NO: 7808. The formats for all gRNAs used in this experiment are shown in Table 36, with the exception of the dgRNA g8 OMePS, which included a crRNA having the sequence mC*mA*mC*AAACGGAAACAAUGCAAGUUUUAGAGCUAU*mG*mC*mU (SEQ ID NO: 7837). and a tracr having the sequence of SEQ ID NO: 7808.

[1026] In vitro erythropoiesis and FACS analysis for HbF containing erythroid cells. After RNP delivery, cells were maintained as per Protocol 1 or Protocol 2. For Protocol 1, the cells were immediately transferred into pre-warmed medium consisting of EDM and supplements. During days 0-7 of culture, EDM was further supplemented with 1 μM hydrocortisone (Sigma H8672), 100 ng/mL human SCF (Life Technologies, Cat. #PHC2113), and 5 ng/mL human IL-3 (Peprotech #10779-598). During days 7-11 of culture, EDM was supplemented with 100 ng/mL of human SCF only. During days 11-21 of culture, EDM had no additional supplements. Cell cultures were adjusted to 4.0×10⁴ cells per ml on day 7. On days 11, 14 and 19, the media was replenished. For Protocol 2, cells were immediately transferred back into 200 μl expansion medium and allowed to expand for an additional 2 days. The cultures were counted at 2 days after RNP delivery. The cells were then pelleted and resuspended in pre-warmed medium consisting of EDM and supplements. During days 0-7 of EDM culture, EDM was further supplemented with 1 μM hydrocortisone (Sigma H8672), 100 ng/mL human SCF (Life Technologies, Cat. #PHC2113), and 5 ng/mL human IL-3 (Peprotech #10779-598). During days 7-11 of culture, EDM was supplemented with 100 ng/mL of human SCF only. During days 11-21 of culture, EDM had no additional supplements. Cell cultures were initiated at 4.0×10⁴ cells per ml on day 0, diluted 4-fold with fresh medium on day 4, and adjusted to 2.0×10⁵ cells per ml on day 7. On days 11, 14 and 19, the media was replenished. Viable cells were counted at 7, 18 and 21 days in EDM culture. All viable cell counts were determined by flow cytometry using AccuCheck Counting Beads (ThermoFisher cat. No. PCB100) with inviable cells discriminated by DAPI (4′,6-Diamidino-2-Phenylindole) staining. For both protocols, on days 7, 14 and 21 of the erythroid differentiation culture, the cells were analyzed by intracellular staining for HbF expression. On days 14 and 21 intracellular staining for HbF expression did not include anti-CD71 and anti-CD235a antibodies, and % of HbF positive cells (F-cells) in the entire viable cell population was reported. LIVE/DEAD® Fixable Near-IR Dead Cell Stain (ThermoFisher L34975) was used as the viability dye.

[1027] Genomic DNA preparation and next generation sequencing (NGS). Genomic DNA was prepared at 2 and 6 days post-electroporation from edited and unedited HSPC cultured by Protocol 2 using Quick Extract DNA Extraction Solution (Epicentre Cat #QE09050).

[1028] Results:

[1029] Without being bound by theory, it is believed that targeted genetic disruption of the HPFH region will relieve repression of γ-globin expression, allowing production of the red blood cells containing elevated HbF protein, (cells expressing fetal hemoglobin are sometimes referred to herein as “F-cells”). The elevated HbF prevents sickling of the red blood cells under deoxygenated conditions and will be therapeutic/curative for the patients of both β-thalassemia and SCD. Autologous hematopoietic stem cell transplantation (HSCT) with ex vivo genome edited HSC from SCD patients was also combined with stem cell expansion enhancing technology, e.g., an aryl hydrocarbon receptor (AHR) inhibitor, e.g., as described in WO2010/059401 (the contents of which are incorporated by reference in their entirety), e.g., Compound 4 to improve ex vivo expansion and increase the dose of gene modified HSC delivered.

[1030] For efficient genome editing via programmable nuclease, Cas9, the successful delivery of guide RNA (gRNA) and Cas9 protein into target cells and tissues is essential. Recent reports demonstrated that Cas9 ribonucleoprotein (RNP) complexes when delivered into target cells by electroporation can accomplish efficient and specific genome editing in several different cell types. Cas9-RNP complexes cleave chromosomal DNA almost immediately after delivery and are degraded rapidly in cells, reducing off-target effects. In contrast, use of plasmid and viral vector systems used to deliver Cas9 results in prolonged expression of the enzyme aggravating off-target effects associated with the system. Additionally, delivery of RNPs into the target cells requires no additional tools which would greatly facilitate translation of genome editing for therapeutic purposes in the clinic. Purified recombinant Cas9 protein and gRNA complexes (RNPs) were delivered into cultured HSPC and an overview experiments used are shown in FIG. 17.

[1031] Recombinant Cas9 protein was purified from Escherichia coli and complexed with synthetic single gRNAs (sgRNA) or dual gRNAs (dgRNA) that consist of crRNA and tracr to generate ribonucleoprotein (RNP) complexes. The formats of gRNAs used in the study are shown in Table 36. The RNP complexes were electroporated into CD34+ HSPC via electroporation as described under materials and methods. The cells were expanded prior to the delivery of RNP complexes and, in some cases (Protocol 2) also after electroporation. Actively dividing cells may facilitate uptake of RNP complexes delivered by electroporation.

[1032] Genomic PCR products of the HPFH region were subjected to next generation sequencing (NGS) to determine the percentage of edited alleles in the cell population. Genome editing at the HFPH locus was observed in cell cultures electroporated with RNPs containing Cas9, crRNA of the given targeting domain and Tracr (FIG. 43), but not in control cells with no targeting domain delivered (RNPs containing only Cas9 and Tracr). In some instances, editing was greater at a given target site using modified sgRNAs relative to the other gRNA formats (FIG. 43). Finally, the indel pattern as well as frequency of each indel was assessed for each gRNA by NGS. Indel pattern across multiple replicates using the same gRNA/Cas9 were similar. Representative most frequently occurring indels at each target site are shown in Table 37.

TABLE 36
gRNA sequences used in the experiments described in
this sub-example. N indicates the residues of the indicated
targeting domain; mN indicates a 2′-OMe-modified
nucleic acid; *indicates a phosphorothioate modification.

| Label | Format | Sequence |
|---|---|---|
| CRxxxxxx | sgRNA | NNNNNNNNNNNNNNNNNNNNGUUUUAGAGCUAGAAAUAGCAAGU |
| sg | | UAAAAUAAGGCUAGUCCGUUAUCAACUUGAAAAAGUGGCACCGA |
| | | GUCGGUGCUUUU |
| CRxxxxxx | sgRNA | mN*mN*mN*NNNNNNNNNNNNNNNNNGUUUUAGAGCUAGAAAUA |
| OMePS sg | | GCAAGUUAAAAUAAGGCUAGUCCGUUAUCAACUUGAAAAAGUGG |
| or | | CACCGAGUCGGUGCmU*mU*mU*U |
| CRxxxxxx | | |
| sg OMePS | | |
| CRxxxxxx | sgRNA | N*N*N*NNNNNNNNNNNNNNNNNGUUUUAGAGCUAGAAAUAGCAA |
| PS sg or | | GUUAAAAUAAGGCUAGUCCGUUAUCAACUUGAAAAAGUGGCACC |
| CRxxxxxx | | GAGUCGGUGCU*U*U*U |
| sg PS | | |
| CRxxxxxx | dgRNA | NNNNNNNNNNNNNNNNNNNNGUUUUAGAGCUAUGCUGUUUUG |
| | | and |
| | | AACAGCAUAGCAAGUUAAAAUAAGGCUAGUCCGUUAUCAACUUG |
| | | AAAAAGUGGCACCGAGUCGGUGCUUUUUUU (SEQ ID NO: 6660) |
| CRxxxxxx | dgRNA | mN*mN*mN*NNNNNNNNNNNNNNNNNGUUUUAGAGCUAUGCUGU |
| OMePS | | U*mU*mU*mG |
| | | and |
| | | AACAGCAUAGCAAGUUAAAAUAAGGCUAGUCCGUUAUCAACUUG |
| | | AAAAAGUGGCACCGAGUCGGUGCUUUUUUU (SEQ ID NO: 6660) |
| CRxxxxxx | dgRNA | N*N*N*NNNNNNNNNNNNNNNNNGUUUUAGAGCUAUGCUGUU*U* |
| PS | | U*G |
| | | and |
| | | AACAGCAUAGCAAGUUAAAAUAAGGCUAGUCCGUUAUCAACUUG |
| | | AAAAAGUGGCACCGAGUCGGUGCUUUUUUU (SEQ ID NO: 6660) |

TABLE 37
Top indels observed for each gRNA (targeting domain and format) from NGS
sequencing at Day 6 post-RNP introduction. gRNA sequences are as indicated
in Table 36. Capital letters are the naturally occurring nucleotides at and near
the target sequence. Deletions relative to the unmodified target sequence
are shown as “-”; insertions are shown as lowercase letters.

| gRNA | | | |
|---|---|---|---|
| targeting | | % of | |
| domain ID | | all | Indel |
| and format | Variant Read (Genomic Sequence) | reads | length |
| g8 dgRNA | ACATTCTTATTTTTATCGAGCACAAACGGAAACAATG----- | 47.57% | −5 |
| OMePS | GCAGCCTCTGCTTAGAAAAAGCTGTGGATAAGCCACCT | | |
| g8 dgRNA | ACATTCTTATTTTTATCGAGCACAAACGGAAACAATG- | 13.92% | −1 |
| OMePS | AATGGCAGCCTCTGCTTAGAAAAAGCTGTGGATAAGCCA | | |
| | CCT | | |
| g8 dgRNA | ACATTCTTATTTTTATCGAGCACAAACGGAAACAATG-- | 2.89% | −2 |
| OMePS | ATGGCAGCCTCTGCTTAGAAAAAGCTGTGGATAAGCCAC | | |
| | CT | | |
| g8 dgRNA | ACATTCTTATTTTTATCGAGCACAAACGGAAACAATGCA-- | 2.01% | −6 |
| OMePS | ----GCCTCTGCTTAGAAAAAGCTGTGGATAAGCCACCT | | |
| g8 dgRNA | ACATTCTTATTTTTATCGAGCACAAACGGAAACAAT- | 1.65% | −1 |
| OMePS | CAATGGCAGCCTCTGCTTAGAAAAAGCTGTGGATAAGCC | | |
| | ACCT | | |
| g8 dgRNA | ACATTCTTATTTTTATCGAGCACAAACGGAAACAAaTGCA | 1.53% | 1 |
| OMePS | ATGGCAGCCTCTGCTTAGAAAAAGCTGTGGATAAGCCAC | | |
| | CT | | |
| CR001028 | TTCTGTCATGTGTGTCTTGACTCAGAAACCCTGTTCTCC---- | 14.45% | −13 |
| | ---------CCACCGCATCTCTTTCAGCAGTTGTTTC | | |
| CR001028 | TTCTGTCATGTGTGTCTTGACTCAGAAACCCTGTTCTCCTC | 7.55% | 0 |
| | TgCATATCTCCCCACCGCATCTCTTTCAGCAGTTGTTTC | | |
| CR001028 | TTCTGTCATGTGTGTCTTGACTCAGAAACCCTGTTCTCCTC | 7.49% | −1 |
| | TA-ATATCTCCCCACCGCATCTCTTTCAGCAGTTGTTTC | | |
| CR001028 | TTCTGTCATGTGTGTCTTGACTCAGAAACCCTGTTCTCCTC | 4.94% | −13 |
| | -------------ACCGCATCTCTTTCAGCAGTTGTTTC | | |
| CR001028 | TTCTGTCATGTGTGTCTTGACTCAGAAACCCTGTTCTCCTC | 4.33% | −4 |
| | TA----TCTCCCCACCGCATCTCTTTCAGCAGTTGTTTC | | |
| CR001028 | TTCTGTCATGTGTGTCTTGACTCAGAAACCCTGTTCTCCTC | 2.83% | −2 |
| | TA--TATCTCCCCACCGCATCTCTTTCAGCAGTTGTTTC | | |
| CR001028 | TTCTGTCATGTGTGTCTTGACTCAGAAACCCTGTTCTCC---- | 19.29% | −13 |
| OMePS sg | ---------CCACCGCATCTCTTTCAGCAGTTGTTTC | | |
| CR001028 | TTCTGTCATGTGTGTCTTGACTCAGAAACCCTGTTCTCCTC | 7.11% | 0 |
| OMePS sg | TgCATATCTCCCCACCGCATCTCTTTCAGCAGTTGTTTC | | |
| CR001028 | TTCTGTCATGTGTGTCTTGACTCAGAAACCCTGTTCTCCTC | 6.26% | −13 |
| OMePS sg | -------------ACCGCATCTCTTTCAGCAGTTGTTTC | | |
| CR001028 | TTCTGTCATGTGTGTCTTGACTCAGAAACCCTGTTCTCCTC | 6.19% | −1 |
| OMePS sg | TA-ATATCTCCCCACCGCATCTCTTTCAGCAGTTGTTTC | | |
| CR001028 | TTCTGTCATGTGTGTCTTGACTCAGAAACCCTGTTCTCCTC | 5.44% | −4 |
| OMePS sg | TA----TCTCCCCACCGCATCTCTTTCAGCAGTTGTTTC | | |
| CR001028 | TTCTGTCATGTGTGTCTTGACTCAGAAACCCTGTTCTCCTC | 2.89% | −2 |
| OMePS sg | TA--TATCTCCCCACCGCATCTCTTTCAGCAGTTGTTTC | | |
| CR001028 | TTCTGTCATGTGTGTCTTGACTCAGAAACCCTGTTCTCC---- | 15.91% | −13 |
| OMePS | ---------CCACCGCATCTCTTTCAGCAGTTGTTTC | | |
| CR001028 | TTCTGTCATGTGTGTCTTGACTCAGAAACCCTGTTCTCCTC | 8.91% | 0 |
| OMePS | TgCATATCTCCCCACCGCATCTCTTTCAGCAGTTGTTTC | | |
| CR001028 | TTCTGTCATGTGTGTCTTGACTCAGAAACCCTGTTCTCCTC | 4.80% | −4 |
| OMePS | TA----TCTCCCCACCGCATCTCTTTCAGCAGTTGTTTC | | |
| CR001028 | TTCTGTCATGTGTGTCTTGACTCAGAAACCCTGTTCTCCTC | 4.59% | −13 |
| OMePS | -------------ACCGCATCTCTTTCAGCAGTTGTTTC | | |
| CR001028 | TTCTGTCATGTGTGTCTTGACTCAGAAACCCTGTTCTCCTC | 2.92% | −1 |
| OMePS | TA-ATATCTCCCCACCGCATCTCTTTCAGCAGTTGTTTC | | |
| CR001028 | TTCTGTCATGTGTGTCTTGACTCAGAAACCtTGTTCTCCTC | 1.75% | 0 |
| OMePS | TACATATCTCCCCACCGCATCTCTTTCAGCAGTTGTTTC | | |
| CR001028 | TTCTGTCATGTGTGTCTTGACTCAGAAACCCTGTTCTCC---- | 13.02% | −13 |
| PS | ---------CCACCGCATCTCTTTCAGCAGTTGTTTC | | |
| CR001028 | TTCTGTCATGTGTGTCTTGACTCAGAAACCCTGTTCTCCTC | 8.11% | 0 |
| PS | TgCATATCTCCCCACCGCATCTCTTTCAGCAGTTGTTTC | | |
| CR001028 | TTCTGTCATGTGTGTCTTGACTCAGAAACCCTGTTCTCCTC | 6.08% | −1 |
| PS | TA-ATATCTCCCCACCGCATCTCTTTCAGCAGTTGTTTC | | |
| CR001028 | TTCTGTCATGTGTGTCTTGACTCAGAAACCCTGTTCTCCTC | 4.43% | −13 |
| PS | -------------ACCGCATCTCTTTCAGCAGTTGTTTC | | |
| CR001028 | TTCTGTCATGTGTGTCTTGACTCAGAAACCCTGTTCTCCTC | 3.86% | −4 |
| PS | TA----TCTCCCCACCGCATCTCTTTCAGCAGTTGTTTC | | |
| CR001028 | TTCTGTCATGTGTGTCTTGACTCAGAAACCCTGTTCTCCTC | 2.96% | −2 |
| PS | TA--TATCTCCCCACCGCATCTCTTTCAGCAGTTGTTTC | | |
| CR001028 | TTCTGTCATGTGTGTCTTGACTCAGAAACCCTGTTCTCC---- | 17.48% | −13 |
| PS sg | ---------CCACCGCATCTCTTTCAGCAGTTGTTTC | | |
| CR001028 | TTCTGTCATGTGTGTCTTGACTCAGAAACCCTGTTCTCCTC | 7.01% | −13 |
| PS sg | -------------ACCGCATCTCTTTCAGCAGTTGTTTC | | |
| CR001028 | TTCTGTCATGTGTGTCTTGACTCAGAAACCCTGTTCTCCTC | 6.84% | 0 |
| PS sg | TgCATATCTCCCCACCGCATCTCTTTCAGCAGTTGTTTC | | |
| CR001028 | TTCTGTCATGTGTGTCTTGACTCAGAAACCCTGTTCTCCTC | 6.05% | −4 |
| PS sg | TA----TCTCCCCACCGCATCTCTTTCAGCAGTTGTTTC | | |
| CR001028 | TTCTGTCATGTGTGTCTTGACTCAGAAACCCTGTTCTCCTC | 4.59% | −2 |
| PS sg | TA--TATCTCCCCACCGCATCTCTTTCAGCAGTTGTTTC | | |
| CR001028 | TTCTGTCATGTGTGTCTTGACTCAGAAACCCTGTTCTCCTC | 3.53% | −1 |
| PS sg | TA-ATATCTCCCCACCGCATCTCTTTCAGCAGTTGTTTC | | |
| CR001028 | TTCTGTCATGTGTGTCTTGACTCAGAAACCCTGTTCTCC---- | 10.58% | −13 |
| sg | ---------CCACCGCATCTCTTTCAGCAGTTGTTTC | | |
| CR001028 | TTCTGTCATGTGTGTCTTGACTCAGAAACCCTGTTCTCCTC | 9.11% | 0 |
| sg | TgCATATCTCCCCACCGCATCTCTTTCAGCAGTTGTTTC | | |
| CR001028 | TTCTGTCATGTGTGTCTTGACTCAGAAACCCTGTTCTCCTC | 6.47% | −1 |
| sg | TA-ATATCTCCCCACCGCATCTCTTTCAGCAGTTGTTTC | | |
| CR001028 | TTCTGTCATGTGTGTCTTGACTCAGAAACCCTGTTCTCCTC | 4.78% | −2 |
| sg | TA--TATCTCCCCACCGCATCTCTTTCAGCAGTTGTTTC | | |
| CR001028 | TTCTGTCATGTGTGTCTTGACTCAGAAACCCTGTTCTCCTC | 4.06% | −13 |
| sg | -------------ACCGCATCTCTTTCAGCAGTTGTTTC | | |
| CR001028 | TTCTGTCATGTGTGTCTTGACTCAGAAACCCTGTTCTCCTC | 3.41% | −4 |
| sg | TA----TCTCCCCACCGCATCTCTTTCAGCAGTTGTTTC | | |
| CR001030 | TCTTGACTCAGAAACCCTGTTCTCCTCTACATATCTC-------- | 8.30% | −13 |
| | ------TTTCAGCAGTTGTTTCTAAAAATATCCTCC | | |
| CR001030 | TCTTGACTCAGAAACCCTGTTCTCCTCTgCATATCTCCCCA | 4.39% | 0 |
| | CCGCATCTCTTTCAGCAGTTGTTTCTAAAAATATCCTCC | | |
| CR001030 | TCTTGACTCAGAAACCCTGTTCTCCTCTACATATCTCCCC | 2.61% | −5 |
| | A-----TCTCTTTCAGCAGTTGTTTCTAAAAATATCCTCC | | |
| CR001030 | TCTTGACTCAGAAACCCTGTTCTCCTCTACATATCTCCCC | 2.18% | −1 |
| | ACC-CATCTCTTTCAGCAGTTGTTTCTAAAAATATCCTCC | | |
| CR001030 | TCTTGACTCAGAAACCtTGTTCTCCTCTACATATCTCCCCA | 2.12% | 0 |
| | CCGCATCTCTTTCAGCAGTTGTTTCTAAAAATATCCTCC | | |
| CR001030 | TCTTGACTCAGAAACCCTGTTCTCCTCTACATATCTCCCC | 2.10% | −2 |
| | ACC--ATCTCTTTCAGCAGTTGTTTCTAAAAATATCCTCC | | |
| CR001030 | TCTTGACTCAGAAACCCTGTTCTCCTCTACATATCTC-------- | 10.40% | −13 |
| IDT | -----TTTCAGCAGTTGTTTCTAAAAATATCCTCC | | |
| CR001030 | TCTTGACTCAGAAACCCTGTTCTCCTCTACATATCTCCCC | 4.56% | 1 |
| IDT | ACCGgCATCTCTTTCAGCAGTTGTTTCTAAAAATATCCTCC | | |
| CR001030 | TCTTGACTCAGAAACCCTGTTCTCCTCTACATATCTCCCC | 3.83% | −1 |
| IDT | AC-GCATCTCTTTCAGCAGTTGTTTCTAAAAATATCCTCC | | |
| CR001030 | TCTTGACTCAGAAACCCTGTTCTCCTCTACATATCTCCCC | 3.68% | −2 |
| IDT | ACC--ATCTCTTTCAGCAGTTGTTTCTAAAAATATCCTCC | | |
| CR001030 | TCTTGACTCAGAAACCCTGTTCTCCTCTACATATCTCCCC | 2.87% | −5 |
| IDT | A-----TCTCTTTCAGCAGTTGTTTCTAAAAATATCCTCC | | |
| CR001030 | TCTTGACTCAGAAACCCTGTTCTCCTCTACATATCT---------- | 2.54% | −15 |
| IDT | -----TTCAGCAGTTGTTTCTAAAAATATCCTCC | | |
| CR001030 | TCTTGACTCAGAAACCCTGTTCTCCTCTACATATCTC-------- | 9.90% | −13 |
| | -----TTTCAGCAGTTGTTTCTAAAAATATCCTCC | | |
| CR001030 | TCTTGACTCAGAAACCCTGTTCTCCTCTACATATCTCCCC | 4.63% | 1 |
| | ACCGgCATCTCTTTCAGCAGTTGTTTCTAAAAATATCCTCC | | |
| CR001030 | TCTTGACTCAGAAACCCTGTTCTCCTCTACATATCTCCCC | 3.71% | −1 |
| | ACC-CATCTCTTTCAGCAGTTGTTTCTAAAAATATCCTCC | | |
| CR001030 | TCTTGACTCAGAAACCCTGTTCTCCTCTACATATCTCCCC | 2.39% | −2 |
| | ACC--ATCTCTTTCAGCAGTTGTTTCTAAAAATATCCTCC | | |
| CR001030 | TCTTGACTCAGAAACCCTGTTCTCCTCTgCATATCTCCCCA | 2.03% | 0 |
| | CCGCATCTCTTTCAGCAGTTGTTTCTAAAAATATCCTCC | | |
| CR001030 | TCTTGACTCAGAAACCCTGTTCTCCTCTACATATCTCCCC | 1.95% | −5 |
| | A-----TCTCTTTCAGCAGTTGTTTCTAAAAATATCCTCC | | |
| CR001030 | TCTTGACTCAGAAACCCTGTTCTCCTCTACATATCTC-------- | 19.91% | −13 |
| OMePS sg | -----TTTCAGCAGTTGTTTCTAAAAATATCCTCC | | |
| CR001030 | TCTTGACTCAGAAACCCTGTTCTCCTCTACATATCTCCCC | 5.76% | −1 |
| OMePS sg | ACC-CATCTCTTTCAGCAGTTGTTTCTAAAAATATCCTCC | | |
| CR001030 | TCTTGACTCAGAAACCCTGTTCTCCTCTACATATCTCCCC | 3.09% | 1 |
| OMePS sg | ACCGgCATCTCTTTCAGCAGTTGTTTCTAAAAATATCCTCC | | |
| CR001030 | TCTTGACTCAGAAACCCTGTTCTCCTCTACATATCTCCCC | 3.03% | −4 |
| OMePS sg | ACCG----TCTTTCAGCAGTTGTTTCTAAAAATATCCTCC | | |
| CR001030 | TCTTGACTCAGAAACCCTGTTCTCCTCTACATATCTCCCC | 2.98% | −6 |
| OMePS sg | AC------TCTTTCAGCAGTTGTTTCTAAAAATATCCTCC | | |
| CR001030 | TCTTGACTCAGAAACCCTGTTCTCCTCTgCATATCT---------- | 2.81% | −15 |
| OMePS sg | -----TTCAGCAGTTGTTTCTAAAAATATCCTCC | | |
| CR001030 | TCTTGACTCAGAAACCCTGTTCTCCTCTACATATCTC-------- | 8.52% | −13 |
| OMePS | -----TTTCAGCAGTTGTTTCTAAAAATATCCTCC | | |
| CR001030 | TCTTGACTCAGAAACCCTGTTCTCCTCTgCATATCTCCCCA | 5.21% | 0 |
| OMePS | CCGCATCTCTTTCAGCAGTTGTTTCTAAAAATATCCTCC | | |
| CR001030 | TCTTGACTCAGAAACCCTGTTCTCCTCTACATATCTCCCC | 2.63% | 1 |
| OMePS | ACCGgCATCTCTTTCAGCAGTTGTTTCTAAAAATATCCTCC | | |
| CR001030 | TCTTGACTCAGAAACCCTGTTCTCCTCTACATATCTCCCC | 2.25% | −1 |
| OMePS | AC-GCATCTCTTTCAGCAGTTGTTTCTAAAAATATCCTCC | | |
| CR001030 | TCTTGACTCAGAAACCCTGTTCTCCTCTACATATCTCCCC | 1.81% | −5 |
| OMePS | A-----TCTCTTTCAGCAGTTGTTTCTAAAAATATCCTCC | | |
| CR001030 | TCTTGACTCAGAAACCCTGTTCTCCTCTACATATCTCCCC | 1.77% | −1 |
| OMePS | ACC-CATCTCTTTCAGCAGTTGTTTCTAAAAATATCCTCC | | |
| CR001030 | TCTTGACTCAGAAACCCTGTTCTCCTCTACATATCTC-------- | 5.99% | −13 |
| PS | -----TTTCAGCAGTTGTTTCTAAAAATATCCTCC | | |
| CR001030 | TCTTGACTCAGAAACCCTGTTCTCCTCTgCATATCTCCCCA | 4.09% | 0 |
| PS | CCGCATCTCTTTCAGCAGTTGTTTCTAAAAATATCCTCC | | |
| CR001030 | TCTTGACTCAGAAACCCTGTTCTCCTCTACATATCTCCCC | 3.90% | 1 |
| PS | ACCGgCATCTCTTTCAGCAGTTGTTTCTAAAAATATCCTCC | | |
| CR001030 | TCTTGACTCAGAAACCCTGTTCTCCTCTACATATCTCCCC | 3.59% | −5 |
| PS | A-----TCTCTTTCAGCAGTTGTTTCTAAAAATATCCTCC | | |
| CR001030 | TCTTGACTCAGAAACCCTGTTCTCCTCTACATATCTCCCC | 2.86% | −1 |
| PS | ACC-CATCTCTTTCAGCAGTTGTTTCTAAAAATATCCTCC | | |
| CR001030 | TCTTGACTCAGAAACCCTGTTCTCCTCTACATATCTCCCC | 2.39% | −2 |
| PS | ACC--ATCTCTTTCAGCAGTTGTTTCTAAAAATATCCTCC | | |
| CR001030 | TCTTGACTCAGAAACCCTGTTCTCCTCTACATATCTC-------- | 11.86% | −13 |
| PS sg | -----TTTCAGCAGTTGTTTCTAAAAATATCCTCC | | |
| CR001030 | TCTTGACTCAGAAACCCTGTTCTCCTCTACATATCTCCCC | 5.20% | −1 |
| PS sg | ACC-CATCTCTTTCAGCAGTTGTTTCTAAAAATATCCTCC | | |
| CR001030 | TCTTGACTCAGAAACCCTGTTCTCCTCTACATATCTCCCC | 3.65% | 1 |
| PS sg | ACCGgCATCTCTTTCAGCAGTTGTTTCTAAAAATATCCTCC | | |
| CR001030 | TCTTGACTCAGAAACCCTGTTCTCCTCTACATATCTCCCC | 3.33% | −2 |
| PS sg | ACC--ATCTCTTTCAGCAGTTGTTTCTAAAAATATCCTCC | | |
| CR001030 | TCTTGACTCAGAAACCCTGTTCTCCTCTACATATCTCCCC | 2.92% | −5 |
| PS sg | A-----TCTCTTTCAGCAGTTGTTTCTAAAAATATCCTCC | | |
| CR001030 | TCTTGACTCAGAAACCCTGTTCTCCTCTACAT--------------- | 2.14% | −15 |
| PS sg | CTCTTTCAGCAGTTGTTTCTAAAAATATCCTCC | | |
| CR001030 | TCTTGACTCAGAAACCCTGTTCTC-------------------------- | 2.08% | −26 |
| PS sg | TTTCAGCAGTTGTTTCTAAAAATATCCTCC | | |
| CR001030 | TCTTGACTCAGAAACCCTGTTCTCCTCTACATATCTC-------- | 11.22% | −13 |
| sg | -----TTTCAGCAGTTGTTTCTAAAAATATCCTCC | | |
| CR001030 | TCTTGACTCAGAAACCCTGTTCTCCTCTACATATCTCCCC | 4.64% | −1 |
| sg | ACC-CATCTCTTTCAGCAGTTGTTTCTAAAAATATCCTCC | | |
| CR001030 | TCTTGACTCAGAAACCCTGTTCTCCTCTACATATCTCCCC | 2.78% | 1 |
| sg | ACCGgCATCTCTTTCAGCAGTTGTTTCTAAAAATATCCTCC | | |
| CR001030 | TCTTGACTCAGAAACCCTGTTCTCCTCTACATATCTCCCC | 2.73% | −5 |
| sg | A-----TCTCTTTCAGCAGTTGTTTCTAAAAATATCCTCC | | |
| CR001030 | TCTTGACTCAGAAACCCTGTTCTCCTCTACATATCTCCCC | 2.34% | −1 |
| sg | AC-GCATCTCTTTCAGCAGTTGTTTCTAAAAATATCCTCC | | |
| CR001030 | TCTTGACTCAGAAACCCTGTTCTCCTCTACATATCTCCCC | 2.29% | −6 |
| sg | AC------TCTTTCAGCAGTTGTTTCTAAAAATATCCTCC | | |
| CR001137 | AAATGCTTATGACAGCAATAATCATAAAAACCTCAAACC | 4.26% | 1 |
| | GGTAGgCCACTTAAATGCTTACCAACAGTAGAATTGATAA | | |
| | AT | | |
| CR001137 | AAATGCTTATGACAGCAATAATCATAAAAACCTCAAACC- | 3.80% | −7 |
| | ------ACTTAAATGCTTACCAACAGTAGAATTGATAAAT | | |
| CR001137 | AAATGCTTATGACAGCAATAATCATAAAAACCTCAAACC | 1.32% | 1 |
| | GGTAaGCCACTTAAATGCTTACCAACAGTAGAATTGATAA | | |
| | AT | | |
| CR001137 | AAATGCTTATGACAGCAATAATCATAAAAACCTCAAACC | 0.98% | −8 |
| | GGTA--------AATGCTTACCAACAGTAGAATTGATAAAT | | |
| CR001137 | AAATGCTTATGACAGCAATAATCATAAAAACCTCAAACC | 0.97% | −7 |
| | GGT-------TAAATGCTTACCAACAGTAGAATTGATAAAT | | |
| CR001137 | AAATGCTTATGACAGCAATAATCATAAAAACCTCAAA----- | 0.85% | −6 |
| | -GCCACTTAAATGCTTACCAACAGTAGAATTGATAAAT | | |
| CR001137 | AAATGCTTATGACAGCAATAATCATAAAAACCTCAAACC | 0.73% | −1 |
| | GGT- | | |
| | GCCACTTAAATGCTTACCAACAGTAGAATTGATAAAT | | |
| CR001137 | AAATGCTTATGACAGCAATAATCATAAAAACCTCAAACC | 19.40% | 1 |
| OMePS sg | GGTAGgCCACTTAAATGCTTACCAACAGTAGAATTGATAA | | |
| | AT | | |
| CR001137 | AAATGCTTATGACAGCAATAATCATAAAAACCTCAAACC- | 7.73% | −7 |
| OMePS sg | ------ACTTAAATGCTTACCAACAGTAGAATTGATAAAT | | |
| CR001137 | AAATGCTTATGACAGCAATAATCATAAAAACCTCAA------- | 2.97% | −7 |
| OMePS sg | GCCACTTAAATGCTTACCAACAGTAGAATTGATAAAT | | |
| CR001137 | AAATGCTTATGACAGCAATAATCATAAAAACCTCAAACC | 2.78% | −8 |
| OMePS sg | GGTA--------AATGCTTACCAACAGTAGAATTGATAAAT | | |
| CR001137 | AAATGCTTATGACAGCAATAATCATAAAAACCTCAAACC | 2.27% | 1 |
| OMePS sg | GGTAaGCCACTTAAATGCTTACCAACAGTAGAATTGATAA | | |
| | AT | | |
| CR001137 | AAATGCTTATGACAGCAATAAT----------------------------------- | 2.06% | −35 |
| OMePS sg | TACCAACAGTAGAATTGATAAAT | | |
| CR001137 | AAATGCTTATGACAGCAATAATCATAAAAACCTCAAA----- | 2.04% | −16 |
| OMePS sg | -----------TGCTTACCAACAGTAGAATTGATAAAT | | |
| CR001137 | AAATGCTTATGACAGCAATAATCATAAAAACCTCAAACC | 5.27% | 1 |
| OMePS | GGTAGgCCACTTAAATGCTTACCAACAGTAGAATTGATAA | | |
| | AT | | |
| CR001137 | AAATGCTTATGACAGCAATAATCATAAAAACCTCAAACC- | 4.66% | −7 |
| OMePS | ------ACTTAAATGCTTACCAACAGTAGAATTGATAAAT | | |
| CR001137 | AAATGCTTATGACAGCAATAATCATAAAAACCTCAAACC | 2.38% | −8 |
| OMePS | GGTA--------AATGCTTACCAACAGTAGAATTGATAAAT | | |
| CR001137 | AAATGCTTATGACAGCAATAATCATAAAAACCTCAAACC | 1.91% | −7 |
| OMePS | GGT-------TAAATGCTTACCAACAGTAGAATTGATAAAT | | |
| CR001137 | AAATGCTTATGACAGCAATAATCATAAAAACCTCAAACC | 1.72% | 1 |
| OMePS | GGTAaGCCACTTAAATGCTTACCAACAGTAGAATTGATAA | | |
| | AT | | |
| CR001137 | AAATGCTTATGACAGCAATAATCATAAAAACCTCAA------- | 1.03% | −7 |
| OMePS | GCCACTTAAATGCTTACCAACAGTAGAATTGATAAAT | | |
| CR001137 | AAATGCTTATGACAGCAATAATCATAAAAACCTCA-------- | 0.82% | −8 |
| OMePS | GCCACTTAAATGCTTACCAACAGTAGAATTGATAAAT | | |
| CR001137 | AAATGCTTATGACAGCAATAATCATAAAAACCTCAAACC- | 7.49% | −7 |
| PS | ------ACTTAAATGCTTACCAACAGTAGAATTGATAAAT | | |
| CR001137 | AAATGCTTATGACAGCAATAATCATAAAAACCTCAAACC | 6.85% | 1 |
| PS | GGTAGgCCACTTAAATGCTTACCAACAGTAGAATTGATAA | | |
| | AT | | |
| CR001137 | AAATGCTTATGACAGCAATAATCATAAAAACCTCAAACC | 2.64% | −8 |
| PS | GGTA--------AATGCTTACCAACAGTAGAATTGATAAAT | | |
| CR001137 | AAATGCTTATGACAGCAATAATCATAAAAACCTCAAACC | 2.11% | 1 |
| PS | GGTAaGCCACTTAAATGCTTACCAACAGTAGAATTGATAA | | |
| | AT | | |
| CR001137 | AAATGCTTATGACAGCAATAATCATAAAAACCTCAAACC | 1.91% | −3 |
| PS | GG---CCACTTAAATGCTTACCAACAGTAGAATTGATAAAT | | |
| CR001137 | AAATGCTTATGACAGCAATAATCATAAAAACCTCAAAC--- | 1.81% | −10 |
| PS | -------TTAAATGCTTACCAACAGTAGAATTGATAAAT | | |
| CR001137 | AAATGCTTATGACAGCAATAATCATAAAAACCTCAAACC | 1.28% | −7 |
| PS | GGT-------TAAATGCTTACCAACAGTAGAATTGATAAAT | | |
| CR001137 | AAATGCTTATGACAGCAATAATCATAAAAACCTCAAACC | 11.90% | 1 |
| PS sg | GGTAGgCCACTTAAATGCTTACCAACAGTAGAATTGATAA | | |
| | AT | | |
| CR001137 | AAATGCTTATGACAGCAATAATCATAAAAACCTCAAACC- | 7.45% | −7 |
| PS sg | ------ACTTAAATGCTTACCAACAGTAGAATTGATAAAT | | |
| CR001137 | AAATGCTTATGACAGCAATAATCATAAAAACCTCAAACC | 4.87% | −25 |
| PS sg | GGTAG-------------------------AATTGATAAAT | | |
| CR001137 | AAATGCTTATGACAGCAATAATCATAAAAACCTCAAACC | 3.82% | −1 |
| PS sg | GGT- | | |
| | GCCACTTAAATGCTTACCAACAGTAGAATTGATAAAT | | |
| CR001137 | AAATGCTTATGACAGCAATAATCATAAAAACCTCAAACC | 3.57% | 1 |
| PS sg | GGTAaGCCACTTAAATGCTTACCAACAGTAGAATTGATAA | | |
| | AT | | |
| CR001137 | AAATGCTTATGACAGCAATAATCATAAAAACCTCAAACC | 2.81% | −1 |
| PS sg | GGTA- | | |
| | CCACTTAAATGCTTACCAACAGTAGAATTGATAAAT | | |
| CR001137 | AAATGCTTATGACAGCAATAATCATAAAAACCTCAAACC | 2.35% | −3 |
| PS sg | GGTA---ACTTAAATGCTTACCAACAGTAGAATTGATAAAT | | |
| CR001137 | AAATGCTTATGACAGCAATAATCATAAAAACCTCAAACC- | 6.84% | −7 |
| sg | ------ACTTAAATGCTTACCAACAGTAGAATTGATAAAT | | |
| CR001137 | AAATGCTTATGACAGCAATAATCATAAAAACCTCAAACC | 4.54% | 1 |
| sg | GGTAGgCCACTTAAATGCTTACCAACAGTAGAATTGATAA | | |
| | AT | | |
| CR001137 | AAATGCTTATGACAGCAATAATCATAAAAACCTCAAACC | 2.46% | 1 |
| sg | GGTAaGCCACTTAAATGCTTACCAACAGTAGAATTGATAA | | |
| | AT | | |
| CR001137 | AAATGCTTATGACAGCAATAATCATAAAAACCTCAAACC | 1.83% | −7 |
| sg | GGT-------TAAATGCTTACCAACAGTAGAATTGATAAAT | | |
| CR001137 | AAATGCTTATGACAGCAATAATCATAAAAACCTCAAACC | 1.11% | −8 |
| sg | GGTA--------AATGCTTACCAACAGTAGAATTGATAAAT | | |
| CR001137 | AAATGCTTATGACAGCAATAATCATAAAAACCTCAAACC | 0.78% | −4 |
| sg | GGTA----CTTAAATGCTTACCAACAGTAGAATTGATAAAT | | |
| CR001137 | AAATGCTTATGACAGCAATAATCATAAAAACCTCAAACC | 0.72% | 1 |
| sg | GGTAtGCCACTTAAATGCTTACCAACAGTAGAATTGATAA | | |
| | AT | | |
| CR001221 | TAGCATCTACTCTTGTTCAGGAAACAATGAGGACCTG---- | 29.13% | −4 |
| | GGCAGTAAGAGTGGTGATTAATAGATAGGGACAAATTGA | | |
| CR001221 | TAGCATCTACTCTTGTTCAGGAAACAATGAGGACCT- | 4.65% | −1 |
| | ACTGGGCAGTAAGAGTGGTGATTAATAGATAGGGACAAA | | |
| | TTGA | | |
| CR001221 | TAGCATCTACTCTTGTTCAGGAAACAATGAGGAC----- | 4.27% | −5 |
| | TGGGCAGTAAGAGTGGTGATTAATAGATAGGGACAAATT | | |
| | GA | | |
| CR001221 | TAGCATCTACTCTTGTTCAGGAAACAATGAGG---------- | 1.47% | −10 |
| | GCAGTAAGAGTGGTGATTAATAGATAGGGACAAATTGA | | |
| CR001221 | TAGCATCTACTCTTGTTCAGGAAACAATGAGGAC---------- | 1.14% | −10 |
| | AGTAAGAGTGGTGATTAATAGATAGGGACAAATTGA | | |
| CR001221 | TAGCATCTACTCTTGTTCAGG------------------------- | 1.04% | −25 |
| | TAAGAGTGGTGATTAATAGATAGGGACAAATTGA | | |
| CR001221 | TAGCATCTACTCTTGTTCAGGAAACAATGAGGACCTtACT | 0.86% | 0 |
| | GGGCAGTAAGAGTGGTGATTAATAGATAGGGACAAATTGA | | |
| CR001221 | TAGCATCTACTCTTGTTCAGGAAACAATGAGGACCTG---- | 26.33% | −4 |
| OMePS sg | GGCAGTAAGAGTGGTGATTAATAGATAGGGACAAATTGA | | |
| CR001221 | TAGCATCTACTCTTGTTCAGGAAACAATGAGGACCT- | 15.83% | −1 |
| OMePS sg | ACTGGGCAGTAAGAGTGGTGATTAATAGATAGGGACAAA | | |
| | TTGA | | |
| CR001221 | TAGCATCTACTCTTGTTCAGGAAACAATGAGGAC----- | 6.26% | −5 |
| OMePS sg | TGGGCAGTAAGAGTGGTGATTAATAGATAGGGACAAATT | | |
| | GA | | |
| CR001221 | TAGCATCTACTCTTGTTCAGGAAACAATGAGGACCTG-- | 3.75% | −2 |
| OMePS sg | TGGGCAGTAAGAGTGGTGATTAATAGATAGGGACAAATT | | |
| | GA | | |
| CR001221 | TAGCATCTACTCTTGTTCAGGAAACAATGAGGACCTGtAC | 2.61% | 1 |
| OMePS sg | TGGGCAGTAAGAGTGGTGATTAATAGATAGGGACAAATT | | |
| | GA | | |
| CR001221 | TAGCATCTACTCTTGTTCAGGAAACAATGAGGAC---------- | 2.15% | −10 |
| OMePS sg | AGTAAGAGTGGTGATTAATAGATAGGGACAAATTGA | | |
| CR001221 | TAGCATCTACTCTTGTTCAGGAAACAATGAGGACCTGAaC | 1.82% | 1 |
| OMePS sg | TGGGCAGTAAGAGTGGTGATTAATAGATAGGGACAAATT | | |
| | GA | | |
| CR001221 | TAGCATCTACTCTTGTTCAGGAAACAATGAGGACCTG---- | 32.73% | −4 |
| OMePS | GGCAGTAAGAGTGGTGATTAATAGATAGGGACAAATTGA | | |
| CR001221 | TAGCATCTACTCTTGTTCAGGAAACAATGAGGACCT- | 6.46% | −1 |
| OMePS | ACTGGGCAGTAAGAGTGGTGATTAATAGATAGGGACAAA | | |
| | TTGA | | |
| CR001221 | TAGCATCTACTCTTGTTCAGGAAACAATGAGGAC----- | 5.49% | −5 |
| OMePS | TGGGCAGTAAGAGTGGTGATTAATAGATAGGGACAAATT | | |
| | GA | | |
| CR001221 | TAGCATCTACTCTTGTTCAGGAAACAATGAGG----------- | 3.16% | −11 |
| OMePS | CAGTAAGAGTGGTGATTAATAGATAGGGACAAATTGA | | |
| CR001221 | TAGCATCTACTCTTGTTCAGGAAACAATGAGG---------- | 2.03% | −10 |
| OMePS | GCAGTAAGAGTGGTGATTAATAGATAGGGACAAATTGA | | |
| CR001221 | TAGCATCTACTCTTGTTCAGGAAACAATGAGGACCTGtAC | 1.53% | 1 |
| OMePS | TGGGCAGTAAGAGTGGTGATTAATAGATAGGGACAAATT | | |
| | GA | | |
| CR001221 | TAGCATCTACTCTTGTTCAGGAAACAATG------------ | 1.05% | −12 |
| OMePS | GGCAGTAAGAGTGGTGATTAATAGATAGGGACAAATTGA | | |
| CR001221 | TAGCATCTACTCTTGTTCAGGAAACAATGAGGACCTG---- | 33.94% | −4 |
| PS | GGCAGTAAGAGTGGTGATTAATAGATAGGGACAAATTGA | | |
| CR001221 | TAGCATCTACTCTTGTTCAGGAAACAATGAGGACCT- | 7.39% | −1 |
| PS | ACTGGGCAGTAAGAGTGGTGATTAATAGATAGGGACAAA | | |
| | TTGA | | |
| CR001221 | TAGCATCTACTCTTGTTCAGGAAACAATGAGGAC----- | 5.05% | −5 |
| PS | TGGGCAGTAAGAGTGGTGATTAATAGATAGGGACAAATT | | |
| | GA | | |
| CR001221 | TAGCATCTACTCTTGTTCAGGAAACAATGAGGAC---------- | 4.03% | −10 |
| PS | AGTAAGAGTGGTGATTAATAGATAGGGACAAATTGA | | |
| CR001221 | TAGCATCTACTCTTGTTCAGGAAACAATGAGGACCTGtAC | 1.52% | 1 |
| PS | TGGGCAGTAAGAGTGGTGATTAATAGATAGGGACAAATT | | |
| | GA | | |
| CR001221 | TAGCATCTACTCTTGTTCAGGAAACAATG------------ | 1.48% | −12 |
| PS | GGCAGTAAGAGTGGTGATTAATAGATAGGGACAAATTGA | | |
| CR001221 | TAGCATCTACTCTTGTTCAGGAAACAATGAGG----------- | 1.43% | −11 |
| PS | CAGTAAGAGTGGTGATTAATAGATAGGGACAAATTGA | | |
| CR001221 | TAGCATCTACTCTTGTTCAGGAAACAATGAGGACCTG---- | 27.00% | −4 |
| PS sg | GGCAGTAAGAGTGGTGATTAATAGATAGGGACAAATTGA | | |
| CR001221 | TAGCATCTACTCTTGTTCAGGAAACAATGAGGACCT- | 13.43% | −1 |
| PS sg | ACTGGGCAGTAAGAGTGGTGATTAATAGATAGGGACAAA | | |
| | TTGA | | |
| CR001221 | TAGCATCTACTCTTGTTCAGGAAACAATGAGGAC----- | 6.57% | −5 |
| PS sg | TGGGCAGTAAGAGTGGTGATTAATAGATAGGGACAAATT | | |
| | GA | | |
| CR001221 | TAGCATCTACTCTTGTTCAGGAAACAATGAGGACCTGtAC | 4.28% | 1 |
| PS sg | TGGGCAGTAAGAGTGGTGATTAATAGATAGGGACAAATT | | |
| | GA | | |
| CR001221 | TAGCATCTACTCTTGTTCAGGAAACAATGAGGACC-- | 3.13% | −2 |
| PS sg | ACTGGGCAGTAAGAGTGGTGATTAATAGATAGGGACAAA | | |
| | TTGA | | |
| CR001221 | TAGCATCTACTCTTGTTCAGGAAACAATGAGGAC---------- | 2.40% | −10 |
| PS sg | AGTAAGAGTGGTGATTAATAGATAGGGACAAATTGA | | |
| CR001221 | TAGCATCTACTCTTGTTCAGGAAACAATGAGGACCTG------ | 2.13% | −8 |
| PS sg | --GTAAGAGTGGTGATTAATAGATAGGGACAAATTGA | | |
| CR001221 | TAGCATCTACTCTTGTTCAGGAAACAATGAGGACCTG---- | 26.35% | −4 |
| sg | GGCAGTAAGAGTGGTGATTAATAGATAGGGACAAATTGA | | |
| CR001221 | TAGCATCTACTCTTGTTCAGGAAACAATGAGGACCT- | 8.55% | −1 |
| sg | ACTGGGCAGTAAGAGTGGTGATTAATAGATAGGGACAAA | | |
| | TTGA | | |
| CR001221 | TAGCATCTACTCTTGTTCAGGAAACAATGAGGAC----- | 7.25% | −5 |
| sg | TGGGCAGTAAGAGTGGTGATTAATAGATAGGGACAAATT | | |
| | GA | | |
| CR001221 | TAGCATCTACTCTTGTTCAGGAAACAATGAGGAC---------- | 2.41% | −10 |
| sg | AGTAAGAGTGGTGATTAATAGATAGGGACAAATTGA | | |
| CR001221 | TAGCATCTACTCTTGTTCAGGAAACAATGAGG----------- | 1.90% | −11 |
| sg | CAGTAAGAGTGGTGATTAATAGATAGGGACAAATTGA | | |
| CR001221 | TAGCATCTACTCTTGTTCAGGAAACAATGAGGACCTG------ | 1.82% | −9 |
| sg | ---TAAGAGTGGTGATTAATAGATAGGGACAAATTGA | | |
| CR001221 | TAGCATCTACTCTTGTTCAGGAAACAATG------------ | 1.81% | −12 |
| sg | GGCAGTAAGAGTGGTGATTAATAGATAGGGACAAATTGA | | |
| CR003035 | CTGGAAGAGAAACAGTTTTAGTATAACAAGTGAAATACC | 12.23% | −3 |
| | CATG---AGTCTGAGGTGCCTATAGGACATCTATATAAATA | | |
| CR003035 | CTGGAAGAGAAAtAGTTTTAGTATAACAAGTGAAATACCC | 8.25% | 0 |
| | ATGCTGAGTCTGAGGTGCCTATAGGACATCTATATAAATA | | |
| CR003035 | CTGGAAGAGAAAtAGTTTTAGTATAACAAGTGAAATACCC | 4.47% | −3 |
| | ATG---AGTCTGAGGTGCCTATAGGACATCTATATAAATA | | |
| CR003035 | CTGGAAGAGAAACAGTTTTAGTATAACAAGTGAAATACC | 3.60% | −1 |
| | CAT- | | |
| | CTGAGTCTGAGGTGCCTATAGGACATCTATATAAATA | | |
| CR003035 | CTGGAAGAGAAACAGTTTTAGTATAACAAGTGA------------- | 2.79% | −14 |
| | -GTCTGAGGTGCCTATAGGACATCTATATAAATA | | |
| CR003035 | CTGGAAGAGAAACAGTTTTAGTATAACAAGTGAAATACC | 2.55% | −2 |
| | CATG-- | | |
| | GAGTCTGAGGTGCCTATAGGACATCTATATAAATA | | |
| CR003035 | CTGGAAGAGAAACAGTTTTAGTATAACAAGTGAAATAC--- | 1.68% | −6 |
| | ---TGAGTCTGAGGTGCCTATAGGACATCTATATAAATA | | |
| CR003035 | CTGGAAGAGAAACAGTTTTAGTATAACAAGTGAAATACC | 13.59% | −3 |
| OMePS sg | CATG---AGTCTGAGGTGCCTATAGGACATCTATATAAATA | | |
| CR003035 | CTGGAAGAGAAACAGTTTTAGTATAACAAGTGAAATACC | 5.56% | −2 |
| OMePS sg | CA--CTGAGTCTGAGGTGCCTATAGGACATCTATATAAATA | | |
| CR003035 | CTGGAAGAGAAACAGTTTTAGTATAACAAGTGAAATACC | 5.34% | −1 |
| OMePS sg | CAT- | | |
| | CTGAGTCTGAGGTGCCTATAGGACATCTATATAAATA | | |
| CR003035 | CTGGAAGAGAAACAGTTTTAGTATAACAAGTGAAATACC | 5.30% | −2 |
| OMePS sg | CATG-- | | |
| | GAGTCTGAGGTGCCTATAGGACATCTATATAAATA | | |
| CR003035 | CTGGAAGAGAAACAGTTTTAGTATAACAAGTGA------------- | 4.70% | −14 |
| OMePS sg | -GTCTGAGGTGCCTATAGGACATCTATATAAATA | | |
| CR003035 | CTGGAAGAGAAAtAGTTTTAGTATAACAAGTGAAATACCC | 4.44% | −3 |
| OMePS sg | ATG---AGTCTGAGGTGCCTATAGGACATCTATATAAATA | | |
| CR003035 | CTGGAAGAGAAACAGTTTTAGTATAACAAGTGAAATACC | 2.05% | −1 |
| OMePS sg | CATG- | | |
| | TGAGTCTGAGGTGCCTATAGGACATCTATATAAATA | | |
| CR003035 | CTGGAAGAGAAACAGTTTTAGTATAACAAGTGAAATACC | 9.22% | −3 |
| OMePS | CATG---AGTCTGAGGTGCCTATAGGACATCTATATAAATA | | |
| CR003035 | CTGGAAGAGAAAtAGTTTTAGTATAACAAGTGAAATACCC | 7.81% | 0 |
| OMePS | ATGCTGAGTCTGAGGTGCCTATAGGACATCTATATAAATA | | |
| CR003035 | CTGGAAGAGAAAtAGTTTTAGTATAACAAGTGAAATACCC | 3.79% | −3 |
| OMePS | ATG---AGTCTGAGGTGCCTATAGGACATCTATATAAATA | | |
| CR003035 | CTGGAAGAGAAACAGTTTTAGTATAACAAGTGAAATACC | 2.63% | −1 |
| OMePS | CAT- | | |
| | CTGAGTCTGAGGTGCCTATAGGACATCTATATAAATA | | |
| CR003035 | CTGGAAGAGAAACAGTTTTAGTATAACAAGTGAAATACC | 2.00% | −2 |
| OMePS | CA--CTGAGTCTGAGGTGCCTATAGGACATCTATATAAATA | | |
| CR003035 | CTGGAAGAGAAACAGTTTTAGTATAACAAGTGA------------- | 1.92% | −14 |
| OMePS | -GTCTGAGGTGCCTATAGGACATCTATATAAATA | | |
| CR003035 | CTGGAAGAGAAACAGTTTTAGTATAACAAGTGAAATACC- | 1.69% | −5 |
| OMePS | ----TGAGTCTGAGGTGCCTATAGGACATCTATATAAATA | | |
| CR003035 | CTGGAAGAGAAACAGTTTTAGTATAACAAGTGAAATACC | 13.91% | −3 |
| PS | CATG---AGTCTGAGGTGCCTATAGGACATCTATATAAATA | | |
| CR003035 | CTGGAAGAGAAAtAGTTTTAGTATAACAAGTGAAATACCC | 6.11% | −3 |
| PS | ATG---AGTCTGAGGTGCCTATAGGACATCTATATAAATA | | |
| CR003035 | CTGGAAGAGAAAtAGTTTTAGTATAACAAGTGAAATACCC | 3.77% | 0 |
| PS | ATGCTGAGTCTGAGGTGCCTATAGGACATCTATATAAATA | | |
| CR003035 | CTGGAAGAGAAACAGTTTTAGTATAACAAGTGAAATACC | 3.64% | −1 |
| PS | CAT- | | |
| | CTGAGTCTGAGGTGCCTATAGGACATCTATATAAATA | | |
| CR003035 | CTGGAAGAGAAACAGTTTTAGTATAACAAGTGAAATACC | 2.39% | −2 |
| PS | CATG-- | | |
| | GAGTCTGAGGTGCCTATAGGACATCTATATAAATA | | |
| CR003035 | CTGGAAGAGAAACAGTTTTAGTATAACAAGTGAAATACC | 2.16% | −2 |
| PS | CA--CTGAGTCTGAGGTGCCTATAGGACATCTATATAAATA | | |
| CR003035 | CTGGAAGAGAAAtAGTTTTAGTATAACAAGTGAAATACCC | 1.87% | −1 |
| PS | AT-CTGAGTCTGAGGTGCCTATAGGACATCTATATAAATA | | |
| CR003035 | CTGGAAGAGAAACAGTTTTAGTATAACAAGTGAAATACC | 8.32% | −1 |
| PS sg | CAT- | | |
| | CTGAGTCTGAGGTGCCTATAGGACATCTATATAAATA | | |
| CR003035 | CTGGAAGAGAAACAGTTTTAGTATAACAAGTGAAATACC | 6.41% | −3 |
| PS sg | CATG---AGTCTGAGGTGCCTATAGGACATCTATATAAATA | | |
| CR003035 | CTGGAAGAGAAACAGTTTTAGTATAACAAGTGAAATACC | 4.19% | −2 |
| PS sg | CATG-- | | |
| | GAGTCTGAGGTGCCTATAGGACATCTATATAAATA | | |
| CR003035 | CTGGAAGAGAAACAGTTTTAGTATAACAAGTGAAATACC | 4.08% | −2 |
| PS sg | CA--CTGAGTCTGAGGTGCCTATAGGACATCTATATAAATA | | |
| CR003035 | CTGGAAGAGAAAtAGTTTTAGTATAACAAGTGAAATACCC | 3.31% | −1 |
| PS sg | AT-CTGAGTCTGAGGTGCCTATAGGACATCTATATAAATA | | |
| CR003035 | CTGGAAGAGAAACAGTTTTAGTATAACAAGTGAAATACC | 2.99% | −4 |
| PS sg | C----TGAGTCTGAGGTGCCTATAGGACATCTATATAAATA | | |
| CR003035 | CTGGAAGAGAAACAGTTTTAGTATAACAAGTGAAATACC- | 2.23% | −5 |
| PS sg | ----TGAGTCTGAGGTGCCTATAGGACATCTATATAAATA | | |
| CR003035 | CTGGAAGAGAAACAGTTTTAGTATAACAAGTGAAATACC | 10.92% | −3 |
| sg | CATG---AGTCTGAGGTGCCTATAGGACATCTATATAAATA | | |
| CR003035 | CTGGAAGAGAAAtAGTTTTAGTATAACAAGTGAAATACCC | 6.05% | −3 |
| sg | ATG---AGTCTGAGGTGCCTATAGGACATCTATATAAATA | | |
| CR003035 | CTGGAAGAGAAACAGTTTTAGTATAACAAGTGAAATACC | 5.42% | −1 |
| sg | CAT- | | |
| | CTGAGTCTGAGGTGCCTATAGGACATCTATATAAATA | | |
| CR003035 | CTGGAAGAGAAAtAGTTTTAGTATAACAAGTGAAATACCC | 4.55% | 0 |
| sg | ATGCTGAGTCTGAGGTGCCTATAGGACATCTATATAAATA | | |
| CR003035 | CTGGAAGAGAAACAGTTTTAGTATAACAAGTGAAATACC | 4.53% | −2 |
| sg | CA--CTGAGTCTGAGGTGCCTATAGGACATCTATATAAATA | | |
| CR003035 | CTGGAAGAGAAACAGTTTTAGTATAACAAGTGAAATACC | 3.59% | −2 |
| sg | CATG-- | | |
| | GAGTCTGAGGTGCCTATAGGACATCTATATAAATA | | |
| CR003035 | CTGGAAGAGAAACAGTTTTAGTATAACAAGTGAAATACC | 2.30% | −4 |
| sg | C----TGAGTCTGAGGTGCCTATAGGACATCTATATAAATA | | |
| CR001128 | GTCTAGTGCAAGCTAACAGTTGCTTTTATCACAGGCTCCA | 10.38% | −1 |
| | GGA-GGGTTTGGCCTCTGATTAGGGTGGGGGCGTGGGTGG | | |
| CR001128 | GTCTAGTGCAAGCTAACAGTTGCTTTTATCACAGGCTCCA | 5.87% | −4 |
| | GG----GTTTGGCCTCTGATTAGGGTGGGGGCGTGGGTGG | | |
| CR001128 | GTCTAGTGCAAGCTAACAGTTGCTTTTATCACAGGCTCCA | 5.50% | 1 |
| | GGAAaGGGTTTGGCCTCTGATTAGGGTGGGGGCGTGGGT | | |
| | GG | | |
| CR001128 | GTCTAGTGCAAGCTAACAGTTGCTTTTATCACAGGCTCCA | 4.87% | −5 |
| | GG-----TTTGGCCTCTGATTAGGGTGGGGGCGTGGGTGG | | |
| CR001128 | GTCTAGTGCAAGCTAACAGTTGCTTTTATCACAGGC-------- | 4.61% | −36 |
| | ----------------------------GTGGGTGG | | |
| CR001128 | GTCTAGTGCAAGCTAACAaC---------------------------- | 2.38% | −28 |
| | ATCACAGGCTCCAGGATAGGGGGCGTGGGTGG | | |
| CR001128 | GTCTAGTGCAAGCTAACAGTTGCTTTTATCACAGGCTCCA | 2.00% | −2 |
| | GGA--GGTTTGGCCTCTGATTAGGGTGGGGGCGTGGGTGG | | |
| CR001128 | GTCTAGTGCAAGCTAACAGTTGCTTTTATCACAGGCTCCA | 7.56% | −23 |
| OMePS | GG-----------------------TGGGGGCGTGGGTGG | | |
| CR001128 | GTCTAGTGCAAGCTAACAGTTGCTTTTATCACAGGCTCCA | 6.53% | −4 |
| OMePS | GG----GTTTGGCCTCTGATTAGGGTGGGGGCGTGGGTGG | | |
| CR001128 | GTCTAGTGCAAGCTAACAGTTGCTTTTATCACAGGCTCCA | 6.18% | −5 |
| OMePS | GG-----TTTGGCCTCTGATTAGGGTGGGGGCGTGGGTGG | | |
| CR001128 | GTCTAGTGCAAGCTAACAGTTGCTTTTATCACAGGCTCCA | 6.06% | −1 |
| OMePS | GGA-GGGTTTGGCCTCTGATTAGGGTGGGGGCGTGGGTGG | | |
| CR001128 | GTCTAGTGCAAGCTAACAGTTGCTTTTATCACAGGCTCCA | 3.92% | 1 |
| OMePS | GGAAaGGGTTTGGCCTCTGATTAGGGTGGGGGCGTGGGT | | |
| | GG | | |
| CR001128 | GTCTAGTGCAAGCTAACAGTTGCTTTTATCACAGGCTCCA | 2.55% | −10 |
| OMePS | GG----------CCTCTGATTAGGGTGGGGGCGTGGGTGG | | |
| CR001128 | GTCTAGTGCAAGCTAACAGTTGCTTTTATCACAGGCTCCA | 10.12% | −1 |
| sg | GGA-GGGTTTGGCCTCTGATTAGGGTGGGGGCGTGGGTGG | | |
| CR001128 | GTCTAGTGCAAGCTAACAGTTGCTTTTATCACAGGCTCCA | 7.05% | −5 |
| sg | GG-----TTTGGCCTCTGATTAGGGTGGGGGCGTGGGTGG | | |
| CR001128 | GTCTAGTGCAAGCTAACAGTTGCTTTTATCACAGGCTCCA | 4.59% | −4 |
| sg | GG----GTTTGGCCTCTGATTAGGGTGGGGGCGTGGGTGG | | |
| CR001128 | GTCTAGTGCAAGCTAACAGTTGCTTTTATCACAGGCTCCA | 4.24% | 1 |
| sg | GGAAaGGGTTTGGCCTCTGATTAGGGTGGGGGCGTGGGT | | |
| | GG | | |
| CR001128 | GTCTAGTGCAAGCTAACAGTTGCTTTTATCACAGGCTCCA | 2.21% | −27 |
| sg | GG---------------------------GGCGTGGGTGG | | |
| CR001128 | GTCTAGTGCAAGCTAACAGTTGCTTTTATCACAGGCTCCA | 1.66% | −30 |
| sg | G------------------------------CGTGGGTGG | | |
| CR001128 | GTCTAGTGCAAGCTAACAGTTGCTTTTATCACAGGC-------- | 1.48% | −17 |
| sg | ---------CTCTGATTAGGGTGGGGGCGTGGGTGG | | |
| CR001128 | GTCTAGTGCAAGCTAACAGTTGCTTTTATCACAGGCTCCA | 10.59% | −5 |
| sg OMePS | GG-----TTTGGCCTCTGATTAGGGTGGGGGCGTGGGTGG | | |
| CR001128 | GTCTAGTGCAAGCTAACAGTTGCTTTTATCACAGGCTCCA | 7.59% | −4 |
| sg OMePS | GG----GTTTGGCCTCTGATTAGGGTGGGGGCGTGGGTGG | | |
| CR001128 | GTCTAGTGCAAGCTAACAGTTGCTTTTATCACAGGCTCCA | 5.92% | −1 |
| sg OMePS | GGA-GGGTTTGGCCTCTGATTAGGGTGGGGGCGTGGGTGG | | |
| CR001128 | GTCTAGTGCAAGCTAACAGTTGCTTTTATCACAGGCTCCA | 3.38% | 1 |
| sg OMePS | GGAAaGGGTTTGGCCTCTGATTAGGGTGGGGGCGTGGGT | | |
| | GG | | |
| CR001128 | GTCTAGTGCAAGCTAACAGTTGCTTTTATCACAGGCTCCA | 2.49% | 2 |
| sg OMePS | GGAAGagGGTTTGGCCTCTGATTAGGGTGGGGGCGTGGGT | | |
| | GG | | |
| CR001128 | GTCTAGTGCAAGCTAACAGTTGCTTTTATCACAGGCTCCA | 1.95% | −16 |
| sg OMePS | GGA----------------TTAGGGTGGGGGCGTGGGTGG | | |
| CR001128 | GTCTAGTGCAAGCTAACAGTTGCTTTTATCACAGGCTCCA | 1.85% | −2 |
| sg OMePS | GGA--GGTTTGGCCTCTGATTAGGGTGGGGGCGTGGGTGG | | |
| CR000312 | TATCACAGGCTCCAGGAAGGGTTTGGCCTCTGATTAGG- | 11.83% | −1 |
| | TGGGGGCGTGGGTGGGGTAGAAGAGGACTGGCAGACCTC | | |
| | TC | | |
| CR000312 | TATCACAGGCTCCAGGAAGGGTTTGG---------------- | 5.11% | −16 |
| | GGGCGTGGGTGGGGTAGAAGAGGACTGGCAGACCTCTC | | |
| CR000312 | TATCACAGGCTCCAGGAAGGGTTTGGC------------------- | 4.33% | −19 |
| | GTGGGTGGGGTAGAAGAGGACTGGCAGACCTCTC | | |
| CR000312 | TATCACAGGCTCCAGGAAGGGTTTGGCCTCTGATT-- | 3.63% | −2 |
| | GGTGGGGGCGTGGGTGGGGTAGAAGAGGACTGGCAGAC | | |
| | CTCTC | | |
| CR000312 | TATCACAGGCTCCAGGAAGGG----------------------- | 2.50% | −23 |
| | GCGTGGGTGGGGTAGAAGAGGACTGGCAGACCTCTC | | |
| CR000312 | TATCACAGGCTCCAGGAAGGGTTTGGCCTCTG------ | 2.47% | −6 |
| | GTGGGGGCGTGGGTGGGGTAGAAGAGGACTGGCAGACCT | | |
| | CTC | | |
| CR000312 | TATCACAGGCTCCAGGAAGGGTTTGGCCTCTG--------- | 2.35% | −9 |
| | GGGGCGTGGGTGGGGTAGAAGAGGACTGGCAGACCTCTC | | |
| CR000312 | TATCACAGGCTCCAGGAAGGGTTTGGCCTCTGATTAGG- | 12.06% | −1 |
| OMePS | TGGGGGCGTGGGTGGGGTAGAAGAGGACTGGCAGACCTC | | |
| | TC | | |
| CR000312 | TATCACAGGCTCCAGGAAGGGTTTGG------------- | 4.75% | −13 |
| OMePS | TGGGGGCGTGGGTGGGGTAGAAGAGGACTGGCAGACCTC | | |
| | TC | | |
| CR000312 | TATCACAGGCTCCAGGAAGGGTTTGGCCTCTGATT-- | 4.32% | −2 |
| OMePS | GGTGGGGGCGTGGGTGGGGTAGAAGAGGACTGGCAGAC | | |
| | CTCTC | | |
| CR000312 | TATCACAGGCTCCAGGAAGGGTTTGGC------------------- | 3.97% | −19 |
| OMePS | GTGGGTGGGGTAGAAGAGGACTGGCAGACCTCTC | | |
| CR000312 | TATCACAGGCTCCAGGAAGGGTTTGG---------------- | 3.28% | −16 |
| OMePS | GGGCGTGGGTGGGGTAGAAGAGGACTGGCAGACCTCTC | | |
| CR000312 | TATCACAGGCTCCAGGAAGGGTTTGGCCTCTGATTAGaGG | 3.25% | 1 |
| OMePS | TGGGGGCGTGGGTGGGGTAGAAGAGGACTGGCAGACCTC | | |
| | TC | | |
| CR000312 | TATCACAGGCTCCAGGAAGGGTTTGGCCTCTGATTAG-- | 1.91% | −2 |
| OMePS | TGGGGGCGTGGGTGGGGTAGAAGAGGACTGGCAGACCTC | | |
| | TC | | |
| CR000312 | TATCACAGGCTCCAGGAAGGGTTTGGCCTCTGATTAG-- | 6.69% | −2 |
| sg | TGGGGGCGTGGGTGGGGTAGAAGAGGACTGGCAGACCTC | | |
| | TC | | |
| CR000312 | TATCACAGGCTCCAGGAAGGGTTTGGCCTCTGATTAGG- | 6.28% | −1 |
| sg | TGGGGGCGTGGGTGGGGTAGAAGAGGACTGGCAGACCTC | | |
| | TC | | |
| CR000312 | TATCACAGGCTCCAGGAAGGGTTTGGCCTCTGA-------------- | 4.58% | −29 |
| sg | ---------------AGGACTGGCAGACCTCTC | | |
| CR000312 | TATCACAGGCTCCAGGAAGGGTTTGGCCTCTGATTAGaGG | 3.83% | 1 |
| sg | TGGGGGCGTGGGTGGGGTAGAAGAGGACTGGCAGACCTC | | |
| | TC | | |
| CR000312 | TATCACAGGCTCCAGGAAGGGTTTGG---------------- | 3.74% | −16 |
| sg | GGGCGTGGGTGGGGTAGAAGAGGACTGGCAGACCTCTC | | |
| CR000312 | TATCACAGGCTCCAGGAAGGGTTTGGCCTCTG--------- | 3.66% | −9 |
| sg | GGGGCGTGGGTGGGGTAGAAGAGGACTGGCAGACCTCTC | | |
| CR000312 | TATCACAGGCTCCAGGAAGGGTTTGGCCTCTGATTAGGG- | 3.19% | −6 |
| sg | -----CGTGGGTGGGGTAGAAGAGGACTGGCAGACCTCTC | | |
| CR000312 | TATCACAGGCTCCAGGAAGGGTTTGG------------- | 3.18% | −13 |
| sg | TGGGGGCGTGGGTGGGGTAGAAGAGGACTGGCAGACCTC | | |
| | TC | | |
| CR000312 | TATCACAGGCTCCAGGAAGGGTTTGGCCTCTGATTAGG- | 12.59% | −1 |
| sg OMePS | TGGGGGCGTGGGTGGGGTAGAAGAGGACTGGCAGACCTC | | |
| | TC | | |
| CR000312 | TATCACAGGCTCCAGGAAGGGTTTGGCCTCTGATT-- | 7.73% | −2 |
| sg OMePS | GGTGGGGGCGTGGGTGGGGTAGAAGAGGACTGGCAGAC | | |
| | CTCTC | | |
| CR000312 | TATCACAGGCTCCAGGAAGGGTTTGGCCTCTG--------- | 6.49% | −9 |
| sg OMePS | GGGGCGTGGGTGGGGTAGAAGAGGACTGGCAGACCTCTC | | |
| CR000312 | TATCACAGGCTCCAGGAAGGGTTTGG---------------- | 5.32% | −16 |
| sg OMePS | GGGCGTGGGTGGGGTAGAAGAGGACTGGCAGACCTCTC | | |
| CR000312 | TATCACAGGCTCCAGGAAGGGTTTGGC------------------- | 3.89% | −19 |
| sg OMePS | GTGGGTGGGGTAGAAGAGGACTGGCAGACCTCTC | | |
| CR000312 | TATCACAGGCTCCAGGAAGGG---------------------- | 2.50% | −22 |
| sg OMePS | GGCGTGGGTGGGGTAGAAGAGGACTGGCAGACCTCTC | | |
| CR000312 | TATCACAGGCTCCAGGAAGGGTTTGG------------- | 2.50% | −13 |
| sg OMePS | TGGGGGCGTGGGTGGGGTAGAAGAGGACTGGCAGACCTC | | |
| | TC | | |
| CR000312 | TATCACAGGCTCCAGGAAGGGTTTGGCCTCTGATTAG-- | 2.25% | −2 |
| sg OMePS | TGGGGGCGTGGGTGGGGTAGAAGAGGACTGGCAGACCTC | | |
| | TC | | |
| CR003085 | ATGTAAGGAGGATGAGCCACATGGTATGGGAGG---------- | 12.51% | −10 |
| | ACTCTAGGGTCAGAGAAATATGGGTTATATCCTTCTA | | |
| CR003085 | ATGTAAGGAGGATGAGCCACATGGTATGGGAGGTAT- | 8.89% | −1 |
| | CTAAGGACTCTAGGGTCAGAGAAATATGGGTTATATCCTT | | |
| | CTA | | |
| CR003085 | ATGTAAGGAGGATGAGCCACATGGTATGGGAGGTATAaC | 7.30% | 1 |
| | TAAGGACTCTAGGGTCAGAGAAATATGGGTTATATCCTTC | | |
| | TA | | |
| CR003085 | ATGTAAGGAGGATGAGCCACATGGTATGGGA------------- | 6.20% | −13 |
| | CTCTAGGGTCAGAGAAATATGGGTTATATCCTTCTA | | |
| CR003085 | ATGTAAGGAGGATGAGCCACATGGTA-------------- | 3.50% | −14 |
| | AGGACTCTAGGGTCAGAGAAATATGGGTTATATCCTTCTA | | |
| CR003085 | ATGTAAGGAGGATGAGCCACATGGTATGGGAGGTA----- | 3.09% | −5 |
| | AGGACTCTAGGGTCAGAGAAATATGGGTTATATCCTTCTA | | |
| CR003085 | ATGTAAGGAGGATGAGCCACATGGTATGGGAGGTATA--- | 2.29% | −3 |
| | AGGACTCTAGGGTCAGAGAAATATGGGTTATATCCTTCTA | | |
| CR003085 | ATGTAAGGAGGATGAGCCACATGGTATGGGAGGTATA- | 1.64% | −1 |
| | TAAGGACTCTAGGGTCAGAGAAATATGGGTTATATCCTTC | | |
| | TA | | |
| CR003085 | ATGTAAGGAGGATGAGCCACATGGTATGG--------- | 1.43% | −9 |
| | TAAGGACTCTAGGGTCAGAGAAATATGGGTTATATCCTTC | | |
| | TA | | |
| CR003085 | ATGTAAGGAGGATGAGCCACATGGTATGGGAGGTATA-- | 1.39% | −2 |
| | AAGGACTCTAGGGTCAGAGAAATATGGGTTATATCCTTCTA | | |
| CR003085 | ATGTAAGGAGGATGAGCCACATGGTATGGGAGGTATAaC | 13.65% | 1 |
| OMePS sg | TAAGGACTCTAGGGTCAGAGAAATATGGGTTATATCCTTC | | |
| | TA | | |
| CR003085 | ATGTAAGGAGGATGAGCCACATGGTATGGGAGG---------- | 10.96% | −10 |
| OMePS sg | ACTCTAGGGTCAGAGAAATATGGGTTATATCCTTCTA | | |
| CR003085 | ATGTAAGGAGGATGAGCCACATGGTATGGGA------------- | 8.21% | −13 |
| OMePS sg | CTCTAGGGTCAGAGAAATATGGGTTATATCCTTCTA | | |
| CR003085 | ATGTAAGGAGGATGAGCCACATGGTATGGGAGGTAT- | 8.15% | −1 |
| OMePS sg | CTAAGGACTCTAGGGTCAGAGAAATATGGGTTATATCCTT | | |
| | CTA | | |
| CR003085 | ATGTAAGGAGGATGAGCCACATGGTA-------------- | 6.29% | −14 |
| OMePS sg | AGGACTCTAGGGTCAGAGAAATATGGGTTATATCCTTCTA | | |
| CR003085 | ATGTAAGGAGGATGAGCCACATGGTATGGGAGGTA----- | 4.53% | −5 |
| OMePS sg | AGGACTCTAGGGTCAGAGAAATATGGGTTATATCCTTCTA | | |
| CR003085 | ATGTAAGGAGGATGAGCCACATGGTATGGGAGGTATA--- | 3.60% | −3 |
| OMePS sg | AGGACTCTAGGGTCAGAGAAATATGGGTTATATCCTTCTA | | |
| CR003085 | ATGTAAGGAGGATGAGCCACATGGTATGGGAGGTA-- | 3.47% | −2 |
| OMePS sg | CTAAGGACTCTAGGGTCAGAGAAATATGGGTTATATCCTT | | |
| | CTA | | |
| CR003085 | ATGTAAGGAGGATGAGCCACATGGTATGGGAGGTATA- | 1.30% | −1 |
| OMePS sg | TAAGGACTCTAGGGTCAGAGAAATATGGGTTATATCCTTC | | |
| | TA | | |
| CR003085 | ATGTAAGGAGGATGAGCCACATGGTATGGG------------------- | 1.00% | −37 |
| OMePS sg | ------------------TTATATCCTTCTA | | |
| CR003085 | ATGTAAGGAGGATGAGCCACATGGTATGGGAGGTATAaC | 10.09% | 1 |
| OMePS | TAAGGACTCTAGGGTCAGAGAAATATGGGTTATATCCTTC | | |
| | TA | | |
| CR003085 | ATGTAAGGAGGATGAGCCACATGGTATGGGAGG---------- | 9.05% | −10 |
| OMePS | ACTCTAGGGTCAGAGAAATATGGGTTATATCCTTCTA | | |
| CR003085 | ATGTAAGGAGGATGAGCCACATGGTATGGGAGGTAT- | 6.52% | −1 |
| OMePS | CTAAGGACTCTAGGGTCAGAGAAATATGGGTTATATCCTT | | |
| | CTA | | |
| CR003085 | ATGTAAGGAGGATGAGCCACATGGTATGGGA------------- | 4.94% | −13 |
| OMePS | CTCTAGGGTCAGAGAAATATGGGTTATATCCTTCTA | | |
| CR003085 | ATGTAAGGAGGATGAGCCACATGGTA-------------- | 4.55% | −14 |
| OMePS | AGGACTCTAGGGTCAGAGAAATATGGGTTATATCCTTCTA | | |
| CR003085 | ATGTAAGGAGGATGAGCCACATGGTATGGGAGGTA----- | 2.40% | −5 |
| OMePS | AGGACTCTAGGGTCAGAGAAATATGGGTTATATCCTTCTA | | |
| CR003085 | ATGTAAGGAGGATGAGCCACATGGTATGGGAGGTA-- | 2.00% | −2 |
| OMePS | CTAAGGACTCTAGGGTCAGAGAAATATGGGTTATATCCTT | | |
| | CTA | | |
| CR003085 | ATGTAAGGAGGATGAGCCACATGGTATGGGAGGTATA--- | 1.82% | −3 |
| OMePS | AGGACTCTAGGGTCAGAGAAATATGGGTTATATCCTTCTA | | |
| CR003085 | ATGTAAGGAGGATGAGCCACATGGTATGGGAGGTATA- | 1.57% | −1 |
| OMePS | TAAGGACTCTAGGGTCAGAGAAATATGGGTTATATCCTTC | | |
| | TA | | |
| CR003085 | ATGTAAGGAGGATGAGCCACATGGTATGGGAGGT---------- | 1.16% | −34 |
| OMePS | ------------------------TATATCCTTCTA | | |
| CR003085 | ATGTAAGGAGGATGAGCCACATGGTATGGGAGG---------- | 15.06% | −10 |
| PS | ACTCTAGGGTCAGAGAAATATGGGTTATATCCTTCTA | | |
| CR003085 | ATGTAAGGAGGATGAGCCACATGGTATGGGAGGTAT- | 11.15% | −1 |
| PS | CTAAGGACTCTAGGGTCAGAGAAATATGGGTTATATCCTT | | |
| | CTA | | |
| CR003085 | ATGTAAGGAGGATGAGCCACATGGTATGGGAGGTATAaC | 8.37% | 1 |
| PS | TAAGGACTCTAGGGTCAGAGAAATATGGGTTATATCCTTC | | |
| | TA | | |
| CR003085 | ATGTAAGGAGGATGAGCCACATGGTATGGGA------------- | 7.44% | −13 |
| PS | CTCTAGGGTCAGAGAAATATGGGTTATATCCTTCTA | | |
| CR003085 | ATGTAAGGAGGATGAGCCACATGGTA-------------- | 5.33% | −14 |
| PS | AGGACTCTAGGGTCAGAGAAATATGGGTTATATCCTTCTA | | |
| CR003085 | ATGTAAGGAGGATGAGCCACATGGTATGGGAGGTA----- | 3.58% | −5 |
| PS | AGGACTCTAGGGTCAGAGAAATATGGGTTATATCCTTCTA | | |
| CR003085 | ATGTAAGGAGGATGAGCCACATGGTATGGGAGGTATA--- | 3.50% | −3 |
| PS | AGGACTCTAGGGTCAGAGAAATATGGGTTATATCCTTCTA | | |
| CR003085 | ATGTAAGGAGGATGAGCCACATGGTATGGGAGGTA-- | 2.05% | −2 |
| PS | CTAAGGACTCTAGGGTCAGAGAAATATGGGTTATATCCTT | | |
| | CTA | | |
| CR003085 | ATGTAAGGAGGATGAGCCACATGGTATGG-------------- | 1.39% | −14 |
| PS | ACTCTAGGGTCAGAGAAATATGGGTTATATCCTTCTA | | |
| CR003085 | ATGTAAGGAGGATGAGCCACATGGTATGGGAGGTATA- | 0.86% | −1 |
| PS | TAAGGACTCTAGGGTCAGAGAAATATGGGTTATATCCTTC | | |
| | TA | | |
| CR003085 | ATGTAAGGAGGATGAGCCACATGGTATGGGAGGTAT- | 12.62% | −1 |
| PS sg | CTAAGGACTCTAGGGTCAGAGAAATATGGGTTATATCCTT | | |
| | CTA | | |
| CR003085 | ATGTAAGGAGGATGAGCCACATGGTATGGGAGGTATAaC | 11.73% | 1 |
| PS sg | TAAGGACTCTAGGGTCAGAGAAATATGGGTTATATCCTTC | | |
| | TA | | |
| CR003085 | ATGTAAGGAGGATGAGCCACATGGTATGGGAGG---------- | 8.86% | −10 |
| PS sg | ACTCTAGGGTCAGAGAAATATGGGTTATATCCTTCTA | | |
| CR003085 | ATGTAAGGAGGATGAGCCACATGGTATGGGA------------- | 6.59% | −13 |
| PS sg | CTCTAGGGTCAGAGAAATATGGGTTATATCCTTCTA | | |
| CR003085 | ATGTAAGGAGGATGAGCCACATGGTA------------- | 4.88% | −14 |
| PS sg | AGGACTCTAGGGTCAGAGAAATATGGGTTATATCCTTCTA | | |
| CR003085 | ATGTAAGGAGGATGAGCCACATGGTATGGGAGGTATA--- | 3.68% | −3 |
| PS sg | AGGACTCTAGGGTCAGAGAAATATGGGTTATATCCTTCTA | | |
| CR003085 | ATGTAAGGAGGATGAGCCACATGGTATGGGAGGTA-- | 3.62% | −2 |
| PS sg | CTAAGGACTCTAGGGTCAGAGAAATATGGGTTATATCCTT | | |
| | CTA | | |
| CR003085 | ATGTAAGGAGGATGAGCCACATGGTATGGGAGGTATA- | 3.48% | −1 |
| PS sg | TAAGGACTCTAGGGTCAGAGAAATATGGGTTATATCCTTC | | |
| | TA | | |
| CR003085 | ATGTAAGGAGGATGAGCCACATGGTATGGGAGGTA----- | 2.90% | −5 |
| PS sg | AGGACTCTAGGGTCAGAGAAATATGGGTTATATCCTTCTA | | |
| CR003085 | ATGTAAGGAGGATGAGCCACATGGTAT------------ | 1.10% | −12 |
| PS sg | AAGGACTCTAGGGTCAGAGAAATATGGGTTATATCCTTCTA | | |
| CR003085 | ATGTAAGGAGGATGAGCCACATGGTATGGGAGG---------- | 11.79% | −10 |
| sg | ACTCTAGGGTCAGAGAAATATGGGTTATATCCTTCTA | | |
| CR003085 | ATGTAAGGAGGATGAGCCACATGGTATGGGAGGTAT- | 9.21% | −1 |
| sg | CTAAGGACTCTAGGGTCAGAGAAATATGGGTTATATCCTT | | |
| | CTA | | |
| CR003085 | ATGTAAGGAGGATGAGCCACATGGTATGGGAGGTATAaC | 6.84% | 1 |
| sg | TAAGGACTCTAGGGTCAGAGAAATATGGGTTATATCCTTC | | |
| | TA | | |
| CR003085 | ATGTAAGGAGGATGAGCCACATGGTATGGGA------------- | 6.44% | −13 |
| sg | CTCTAGGGTCAGAGAAATATGGGTTATATCCTTCTA | | |
| CR003085 | ATGTAAGGAGGATGAGCCACATGGTA-------------- | 4.12% | −14 |
| sg | AGGACTCTAGGGTCAGAGAAATATGGGTTATATCCTTCTA | | |
| CR003085 | ATGTAAGGAGGATGAGCCACATGGTATGGGAGGTA----- | 3.46% | −5 |
| sg | AGGACTCTAGGGTCAGAGAAATATGGGTTATATCCTTCTA | | |
| CR003085 | ATGTAAGGAGGATGAGCCACATGGTATGGGAGGTATA--- | 3.22% | −3 |
| sg | AGGACTCTAGGGTCAGAGAAATATGGGTTATATCCTTCTA | | |
| CR003085 | ATGTAAGGAGGATGAGCCACATGGTATGGGAGGTA-- | 1.65% | −2 |
| sg | CTAAGGACTCTAGGGTCAGAGAAATATGGGTTATATCCTT | | |
| | CTA | | |
| CR003085 | ATGTAAGGAGGATGAGCCACATGGTATGGGAGGTATA- | 1.07% | −1 |
| sg | TAAGGACTCTAGGGTCAGAGAAATATGGGTTATATCCTTC | | |
| | TA | | |
| CR003085 | ATGTAAGGAGGATGAGCCACATGGTATGG-------------- | 0.95% | −14 |
| sg | ACTCTAGGGTCAGAGAAATATGGGTTATATCCTTCTA | | |

[1033] The genome edited and unedited HSPC were analyzed for proliferation and HbF upregulation in a three-stage erythroid differentiation cell culture protocol. The genome edited and unedited HSPC were analyzed by flow cytometry for expression levels of fetal globin and at day 7 for two erythroid cell surface markers, transferrin receptor (CD71) and glycophorin A (CD235a) using antibodies conjugated to fluorescent dyes. The live cells were identified and gated by exclusion of Live/Dead Fixable Dead Cell Stain. Genome editing with the included HPFH region targeting and BCL11A erythroid enhancer targeting gRNAs did not adversely affect erythroid differentiation as the cultured cells showed percentages of CD71+ cells consistent with erythroblasts similar to unedited cells at day 7 of differentiation, although Protocol 1 and Protocol 2 differed in percentages of CD71+ across conditions (FIG. 44). Cultures treated with the included HPFH region targeting and BCL11A erythroid enhancer targeting gRNAs resulted in similar patterns of relative changes in the percentage of erythroid cells containing HbF compared to mock electroporated cells throughout the 21 day culture period and between the two protocols (FIGS. 45, FIG. 46 and FIG. 47). HbF was induced in cells exposed to RNPs and maintained in either Protocol 1 or Protocol 2, however, the percentage of cells that were HbF positive tended to be lower across conditions and timepoints with Protocol 2 (FIGS. 45, FIG. 46 and FIG. 47). Induction of HbF was most pronounced with gRNAs consisting of target domains CR001030, CR00312 and CR001128, particularly at the later timepoints (FIGS. 45, FIG. 46 and FIG. 47). Across targeting domains, sgRNAs trended to higher induction of HbF than dgRNAs, particularly OMePS modified sgRNAs (FIGS. 45, FIG. 46 and FIG. 47). Relatively low induction of HbF with targeting domain CR001137 may be explained by the lower level of editing at this target site (FIGS. 43, FIG. 45-FIG. 47). Induction of HbF positive cells by dgRNA including the targeting domain of g8 targeting exon 2 of BCL11A was also observed in parallel (FIG. 45-FIG. 47). An increase in HbF-containing erythrocytes derived from genome edited cells is likely to have therapeutic implications by reduced sickling. Edited cells were capable of proliferating in erythroid differentiation conditions (9 to 53-fold at day 7 and 36 to 143-fold at day 21, FIG. 48), however, in some cases, proliferation was suppressed relative to unedited control cells (14-83% of unedited control at day 7 and 18-95% of unedited control at day 21) (FIG. 48). Lowest proliferation was observed with the cells edited by dgRNA including the targeting domain of g8 targeting exon 2 of BCL11A (30% of unedited control at day 7 and 18% of unedited control at day 21) and with many of the OMePS modified sgRNAs (FIG. 48).

### Example 5 Excision Using Two gRNAs to the HPFH Region

[1034] Primary human CD34+ HSPCs were electroporated with RNP containing two different gRNA molecules to different sites within the HPFH region. For each RNP, dgRNA molecules as described above, were used. Briefly, RNP comprising a dgRNA targeting a first site within the French HPFH region and RNP comprising a dgRNA targeting a second site within the French HPFH region were combined, and electroporated into CD34+ HSPCs in the following ratios: 0.5× first dgRNA RNP+0.5× second dgRNA RNP; 1.0×g2 dgRNA (“g2”=positive control comprising a targeting domain of CR000088, which targets a coding sequence of the BCL11a gene); no RNPs (“control”). Cells were cultured as described above, and differentiated into erythrocytes using the protocol described above (see FIG. 17). Fetal hemoglobin expression was assessed. The results are showing in FIG. 27 and Table 25. Without being bound by theory, it is believed that simultaneous introduction of RNPs comprising gRNA molecules to two target sequences will cause the deletion (i.e., excision) of the DNA between the two cut sites (e.g., all or most of the DNA between the two cut sites), including any regulatory or coding sequences contained within that region. These results show that RNPs targeting two separate regions within the HPFH region could be delivered simultaneously to CD34+ HSPCs by electroporation and induce fetal hemoglobin expression in edited cells differentiated into erythrocytes.

TABLE 25

| Guide RNA targeting | |
|---|---|
| domain ID 1/Guide RNA | % HbF+ (F cells), average |
| targeting domain ID 2 | of replicates |
| CR001016/CR001021 | 50.9 |
| CR001021/CR001034 | 53.4 |
| CR001034/CR001037 | 56.1 |
| CR001037/CR001045 | 50.6 |
| CR001045/CR001058 | 45.2 |
| CR001058/CR001065 | 42.6 |
| CR001065/CR001075 | 43.3 |
| CR001075/CR001086 | 40.4 |
| CR001086/CR001096 | 39.3 |
| CR001096/CR001107 | 41.6 |
| CR001107/CR001135 | 45.6 |
| CR001143/CR001151 | 40.1 |
| CR001151/CR001159 | 40.9 |
| CR001159/CR001166 | 42.0 |
| CR001166/CR001173 | 44.8 |
| CR001173/CR001179 | 43.1 |
| CR001179/CR001191 | 41.9 |
| CR001191/CR001199 | 42.7 |
| CR001199/CR001212 | 48.3 |
| CR001212/CR001227 | 45.6 |
| CR001016/CR001034 | 53.4 |
| CR001034/CR001045 | 50.0 |
| CR001045/CR001065 | 44.2 |
| CR001065/CR001086 | 39.1 |
| CR001086/CR001107 | 43.4 |
| CR001107/CR001143 | 44.8 |
| CR001143/CR001159 | 45.0 |
| CR001159/CR001173 | 46.6 |
| CR001173/CR001191 | 44.8 |
| CR001191/CR001212 | 51.7 |
| CR001021/CR001037 | 56.9 |
| CR001037/CR001058 | 48.0 |
| CR001058/CR001075 | 41.7 |
| CR001075/CR001096 | 41.5 |
| CR001096/CR001135 | 44.3 |
| CR001135/CR001151 | 42.9 |
| CR001151/CR001166 | 41.9 |
| CR001166/CR001179 | 40.4 |
| CR001179/CR001199 | 38.5 |
| CR001199/CR001227 | 40.0 |
| g2 | 54.0 |
| ctrl | 34.5 |

### Example 6. Potential Off-Target Editing Assessment of gRNAs Targeting the BCL11a Enhancer

[1035] An oligo insertion based assay (See, e.g., Tsai et al., Nature Biotechnology. 33, 187-197; 2015) was used to determine potential off-target genomic sites cleaved by Cas9 targeting the BCL11a enhancer. A total of 28 guides (dual guide RNAs comprising the indicated targeting domain) targeting the BCL11a enhancer and 10 gRNAs targeting the HPFH region were screened in the Cas9-expressing HEK293 cells described above, and the results are plotted in FIG. 33 (BCL11a enhancer) and FIG. 49 (HPFH). With respect to the gRNAs targeting the BCL11a enhancer, the assay identified potential off-target sites for some guides, however targeted deep sequencing was used to determine whether the potential sites were bona fide off-target sites cleaved by Cas9. Using primers that flanked the potential off-target sites, isolated genomic DNA was amplified and the amplicons were sequenced. If the potential off-target site was cleaved by Cas9, indels should be detected at the site. From these follow-on interrogations of the potential off-target sites, no indels were detected at the potential off-target sites for at least three of the guide RNAs: CR000311, CR000312, CR001128. With respect to the gRNAs targeting the BCL11a enhancer, the assay did not identify any potential off-target sites for at least gRNAs CR001137, CR001212, and CR001221. Targeted deep sequencing will be performed to determine whether the potential off target sites identified for the other gRNA molecules are bona-fide off target sites cleaved by Cas9.

### Example 7: Evaluation of Cas9 Variants

[1036] Evaluation in CD34+ Hematopoietic Stem Cells

[1037] We evaluated 14 purified Streptococcus pyogenes Cas9 (SPyCas9) proteins by measuring their efficiency of knocking out the beta-2-microglobulin (B2M) gene in primary human hematopoietic stem cells (HSCs). These proteins were divided into 3 groups: the first group consisted of SPyCas9 variants with improved selectivity (Slaymaker et al. 2015, Science 351: 84 (e1.0, e1.1 and K855A); Kleinstiver et al. 2016, Nature 529: 490 (HF)). The second group consisted of wild type SPyCas9 with different numbers and/or positions of the SV40 nuclear localization signal (NLS) and the 6× Histidine (His6) (SEQ ID NO: 2969) or 8× Histidine (His8) tag (SEQ ID NO: 2970) with or without a cleavable TEV site, and a SPyCas9 protein with two cysteine substitutions (C80L, C574E), which have been reported to stabilize Cas9 for structural studies (Nishimasu et al. 2014, Cell 156:935). The third group consisted of the same recombinant SPyCas9 produced by different processes (FIG. 60). B2M knockout was determined by FACS and next generation sequencing (NGS).

[1038] Methods

[1039] Materials
[1040] 1. Neon electroporation instrument (Invitrogen, MPK5000)
[1041] 2. Neon electroporation kit (Invitrogen, MPK1025)
[1042] 3. crRNA (targeting domain sequence of GGCCACGGAGCGAGACAUCU (SEQ ID NO: 2811), complementary to a sequence in the B2M gene, fused to SEQ ID NO: 6607)
[1043] 4. tracrRNA (SEQ ID NO: 6660)
[1044] 5. Cas9 storage buffer: 20 mM Tris-Cl, pH 8.0, 200 mM KCl, 10 mM MgCl₂
[1045] 6. Bone marrow derived CD34+ HSCs (Lonza, 2M-101C)
[1046] 7. Cell culture media (Stemcell Technologies, StemSpam SFEM II with StemSpam CC-100)
[1047] 8. FACS wash buffer: 2% FCS in PBS
[1048] 9. FACS block buffer: per mL PBS, add 0.5 ug mouse IgG, 150 ug Fc block, 20 uL FCS
[1049] 10. Chelex suspension: 10% Chelex 100 (bioRad, Cat #142-1253) in H₂O
[1050] 11. Anti-B2M antibody: Biolegend, cat #316304

[1051] Process

[1052] Thaw and grow the cells following Lonza's recommendations, add media every 2-3 days. On day 5, pellet the cells at 200×g for 15 min, wash once with PBS, resuspend the cells with T-buffer from NEON kit at 2×10⁴/uL, put on ice. Dilute Cas 9 protein with Cas9 storage buffer to 5 mg/ml. Reconstitute crRNA and tracrRNA to 100 uM with H₂O. The ribonucleoprotein (RNP) complex is made by mixing 0.8 uL each of CAS 9 protein, crRNA and tracrRNA with 0.6 uL of Cas9 storage buffer, incubate at room temperature for 10 min. Mix 7 uL of HSCs with RNP complex for two minutes and transfer the entire 10 uL into a Neon pipette tip, electroporate at 1700v, 20 ms and 1 pulse. After electroporation, immediately transfer cells into a well of 24-well plate containing 1 ml media pre-calibrated at 37° C., 5% CO₂. Harvest cells 72 hrs post-electroproation for FACS and NGS analysis.

[1053] FACS: take 250 uL of the cells from each well of 24-well plate, to wells of 96-well U-bottom plate and pellet the cells. Wash once with 2% FCS (fetal calf serum)-PBS. Add 50 uL FACS block buffer to the cells and incubate on ice for 10 minutes, add 1 uL FITC labeled B2M antibody and incubate for 30 minutes. Wash with 150 uL FACS wash buffer once followed by once more with 200 uL FACS wash buffer once. Cells were resuspended in 200 uL FACS buffer FACS analysis.

[1054] NGS sample prep: transfer 250 uL of cell suspension from each well of the 24-well plate to a 1.5 ml Eppendorf tube, add 1 mL PBS and pellet the cells. Add 100 uL of Chelex suspension, incubate at 99° C. for 8 minutes and vortex 10 seconds followed by incubating at 99° C. for 8 minutes, vortex 10 seconds. Pellet down the resin by centrifuging at 10,000×g for 3 minutes and the supernatant lysate is used for PCR. Take 4 uL lysate and do PCR reaction with the b2m primers (b2 mg67F: CAGACAGCAAACTCACCCAGT (SEQ ID NO: 2812), b2 mg67R: CTGACGCTTATCGACGCCCT (SEQ ID NO: 2813)) using Titanium kit (Clonetech, cat #639208) and follow the manufacturer's instruction. The following PCR conditions are used: 5 minutes at 98° C. for 1 cycle; 15 seconds at 95° C., 15 seconds at 62° C., and 1 minute at 72° C. for 30 cycles; and finally 3 minutes at 72° C. for 1 cycle. The PCR product was used for NGS.

[1055] Statistics: The percentage of B2M KO cells by FACS and the percentage of indels by NGS are used to evaluate the CAS 9 cleavage efficiency. The experiment was designed with Cas9 as fixed effect. Each experiment is nested within donors, as nested random effects. Therefore, the mixed linear model was applied for the analysis of FACS and NGS data.

[1056] Results

[1057] In order to normalize the experimental and donor variations, we graphed the relative activity of each protein to iProt105026, the original design with two SV40 NLS flanking the wild type SPyCas9 and the His6 tag (SEQ ID NO: 2969) at the C-terminal of the protein (FIG. 34). The statistical analysis shows that compared with the reference Cas9 protein iProt105026, iProt106331, iProt106518, iProt106520 and iProt106521 are not significantly different in knocking out B2M in HSCs, while the other variants tested (PID426303, iProt106519, iProt106522, iProt106545, iProt106658, iProt106745, iProt106746, iProt106747, iProt106884) are highly significantly different from the reference iProt105026 in knocking out B2M in HSCs. We found that moving the His6 tag (SEQ ID NO: 2969) from the C-terminal to N-terminal (iProt106520) did not affect the activity of the protein (FIG. 34). One NLS was sufficient to maintain activity only when it was placed at the C-terminal of the protein (iProt106521 vs. iProt106522, FIG. 34). Proteins purified from process 1 had consistent higher knockout efficiency than those from processes 2 and 3 (iProt106331 vs. iProt106545 & PID426303, FIG. 34). In general, the SPyCas9 variants with a reported improved selectivity were not as active as the wild type SPyCas9 (iProt106745, iProt106746 and iProt106747, FIG. 34). Interestingly iProt106884 did not cut the targeting site. This is consistent with the report by Kleinstiver et al that this variant failed to cut up to 20% of the legitimate targeting sites in mammalian cells (Kleinstiver et al. 2016, Nature 529: 490). Finally, the Cas9 variant with two cysteine substitutions (iProt106518) maintained high levels of enzymatic activity (FIG. 34).

[1058] Next, editing efficiency of RNPs comprising different Cas9 variants were tested with either modified or unmodified gRNAs targeting the +58 enhancer region. sgRNA molecules comprising the targeting domains of cr00312 and cr1128 were tested in either unmodified (CR00312=SEQ ID NO: 342; CR001128=SEQ ID NO: 347) or modified (OMePS CR00312=SEQ ID NO: 1762; OMePS CR001128=SEQ ID NO: 1763), and were precomplexed with Cas9 variants shown in Table 35.

TABLE 35
Cas9 variants tested for biological function with +58 enhancer region-
targeting gRNA molecules.

| iProt Code | Construct |
|---|---|
| iProt106518 | NLS-Cas9(C80L/C574E)-NLS-His6 |
| iProt106331 | NLS-Cas9-NLS-His6 |
| iProt106745 | NLS-Cas9(K855A)-NLS-His6 |
| iProt106884 | NLS-Cas9(HF)-NLS-His6 |

[1059] RNP formed as described above were delivered to HSPC cells as described above, and the cells assessed for % editing (by NGS) and % HbF induction upon erythroid differentiation, as described in these Examples. The results are shown in FIG. 42A (% editing) and FIG. 42B (HbF induction). The results show that varying the Cas9 component between those variants tested did not alter the gene editing efficiency of both unmodified and modified versions of sgRNA CR00312 and CR001128, nor did the Cas9 variants impact the ability of the erythroid-differentiated gene edited cells to produce HbF.

### Example 8: Ex Vivo Expansion of Gene Edited HSPCs, and Editing Analysis in HSPC Subsets

[1060] Expansion of Cells Prior to Gene-Editing

[1061] Human bone marrow CD34⁺ cells were purchased from either AllCells (Cat #: ABM017F) or Lonza (Cat #: 2M-101C) and expanded for 2 to 3 days using StemSpan SFEM (StemCell Technologies; Cat no. 09650) supplemented with 50 ng/mL of thrombopoietin (Tpo, Peprotech; Cat #300-18), 50 ng/mL of human Flt3 ligand (Flt-3L, Peprotech; Cat #300-19), 50 ng/mL of human stem cell factor (SCF, Peprotech; Cat #300-07), human interleukin-6 (IL-6, Peprotech; Cat #200-06), 1% L-glutamine; 2% penicillin/streptomycin, and Compound 4 (0.75 μM).

[1062] Electroporation of Cas9 and Guide RNA Ribonucleoprotein (RNP) Complexes into Cells

[1063] Cas9-guide RNA ribonucleoprotein complexes (RNPs) were prepared immediately prior to electroporation. For formation of RNP using dual guide RNAs, 3 μg of each of crRNA (in 2.24 μL) and tracrRNA (in 1.25 μL) were first denatured at 95° C. for 2 min in separate tubes and then cooled to room temperature. For preparation of Cas9 protein, 7.3 μg of CAS9 protein (in 1.21 μL) was mixed with 0.52 μL of 5×CCE buffer (20 mM HEPES, 100 mM KCL, 5 mM MgCL2, 5% Glycerol and freshly added 1 mM DTT). TracrRNA was first mixed with the Cas9 preparation and incubated at 37° C. for 5 min. The CrRNA was then added to TracrRNA/CAS9 complexes and incubated for 5 min at 37° C. The HSPC were collected by centrifugation at 200×g for 15 min and resuspended in T buffer affiliated with the Neon electroporation kit (Invitrogen; Cat #: MPK1096) at a cell density of 2×10⁷/mL. RNP was mixed with 12 μL of cells by pipetting up and down 3 times gently. To prepare single guide RNA (sgRNA) and Cas9 complexes, 2.25 μg sgRNA (in 1.5 μL) was mixed with 2.25 μg Cas9 protein (in 3 μL) and incubated at RT for 5 min. The sgRNA/Cas9 complex was then mixed with 10.5 μL of 2×10⁷/mL cells by pipetting up and down several times gently and incubated at RT for 2 min. The RNP/cell mixture (10 μL) was transferred into a Neon electroporation probe. Electroporation was performed with Neon transfection system (Invitrogen; MPK5000S) using 1700 volts/20 milliseconds and 1 pulse.

[1064] Expansion of Cells after Gene-Editing

[1065] After electroporation, the cells were transferred into 0.5 mL pre-warmed StemSpan SFEM medium supplemented with growth factors, cytokines and Compound 4 as described above and cultured at 37° C. for 3 days. After a total of 10 days of cell expansion, 3 days before electroporation and 7 days after electroporation, the total cell number increased 2-7 fold relative to the starting cell number (FIG. 35).

[1066] Genomic DNA Preparation

[1067] Genomic DNA was prepared from edited and unedited HSPC at 48 hours post-electroporation. Cells were lysed in 10 mM Tris-HCL, pH 8.0; 0.05% SDS and freshly added Protease K of 25 μg/mL and incubated at 37° C. for 1 hour followed by additional incubation at 85° C. for 15 min to inactivate protease K.

[1068] T7E1 Assay

[1069] To determine editing efficiency of HSPCs, T7E1 assay was performed. PCR was performed using Phusion Hot Start II High-Fidelity kit (Thermo Scientific; Cat #: F-549L) with the following cycling condition: 98° C. for 30″; 35 cycles of 98° C. for 5″, 68° C. for 20′, 72° C. for 30″; 72° C. for 5 min. The following primers were used: forward primer: 5′-AGCTCCAAACTCTCAAACCACAGGG-3′ (SEQ ID NO: 2001) and reverse primer: 5′-TACAATTTTGGGAGTCCACACGGCA-3′ (SEQ ID NO: 2002). PCR products were denatured and re-annealed using the following condition: 95° C. for 5 min, 95-85° C. at −2° C./s, 85-25° C. at −0.1° C./s, 4° C. hold. After annealing, 1 μL of mismatch-sensitive T7 E1 nuclease (NEB, Cat #M0302L) was added into 10 μL of PCR product above and further incubated at 37° C. for 15 min for digestion of hetero duplexes, and the resulting DNA fragments were analyzed by agarose gel (2%) electrophoresis. Editing efficiency was quantified using ImageJ software (http://rsb.info.nih.gov/ij/).

[1070] PCR Preparation for Next Generation Sequencing (NGS)

[1071] To determine editing efficiency more precisely and patterns of insertions and deletions (indels), the PCR products were subjected to next generation sequencing (NGS). The PCR were performed in duplicate using Titanium Taq PCR kit (Clontech Laboratories; Cat #: 639210) with the following cycling condition: 98° C. for 5 min; 30 cycles of 95° C. for 15 seconds, 68° C. for 15 seconds, 72° C. 1 min; 72° C. for 7 min. The following primers were used: forward primer: 5′-AGCTCCAAACTCTCAAACCACAGGG-3′ (SEQ ID NO: 2001) and reverse primer: 5′-TACAATTTTGGGAGTCCACACGGCA-3′ (SEQ ID NO: 2002). The PCR products were analyzed by 2% agarose gel electrophoresis and submitted for deep sequencing.

[1072] Flow Cytometry Analysis of Editing Efficiency in Hematopoietic Stem and Progenitor Subpopulations.

[1073] Cells were subjected to flow cytometry to characterize editing efficiency in stem and progenitor cell (HSPC) subpopulations. The frequencies of HSPC subsets, including CD34+ cells, CD34+CD90+ cells, CD34+CD90+CD45RA− cells, and CD34+CD90+CD45RA−CD49f+ cells, prior to (48 hours in culture) and after genome editing (10 days in culture; 3 days after genome editing) was determined from sampling aliquots of cell cultures (FIG. 36, FIG. 37, FIG. 38). Cells were incubated with anti-CD34 (BD Biosciences, Cat #555824), anti-CD38 (BD Biosciences, Cat #560677), anti-CD90 (BD Biosciences, Cat #555596), anti-CD45RA (BD Biosciences, Cat #563963), anti-CD49f (BD Biosciences, Cat #562582) in modified FACS buffer, containing PBS supplemented with 0.5% BSA, 2 mM EDTA pH7.4, at 4° C., in dark for 30 min. Cell viability was determined by 7AAD. Cells were washed with modified FACS buffer and multicolor FACS analysis was performed on a Fortessa (BD Biosciences). Flow cytometry results were analyzed using Flowjo software. Genome edited cells grown in the presence of Compound 4 (alone) exhibited detectible levels of all HSPC subsets assessed, including CD34+, CD34+CD90+, CD34+CD90+CD45RA−, and CD34+CD90+CD45RA−CD49f+ subsets, indicating that long-term HSC populations persist in cell culture in the presence of Compound 4 (alone) after genome editing (FIG. 38).

[1074] Four hours after gene editing, aliquots of cell cultures were sampled and cells were sorted into HSPC subsets (CD34+, CD34+CD38+, CD34+CD38−, CD34+CD38−CD45RA−, CD34+CD38−CD45RA−CD90+CD49f−, CD34+CD38−CD45RA−CD90−CD49f−, and CD34+CD38−CD45RA−CD90−CD49f+ cells) and subjected to NGS to measure the editing efficiency (Table 28). It is important to note that all hematopoietic subsets, including the subsets enriched in long-term HSCs, displayed similarly high gene editing efficiencies (>95%). This high gene editing efficiency in long-term HSCs has significant therapeutic impact as these cells are capable of engrafting patients in the long-term and sustain life-long hematopoietic multi-lineage regeneration.

TABLE 28
Editing efficiency in each HSPC subset measured by NGS.

| gRNA | HSPC subsets | Avg (% Indels) |
|---|---|---|
| Dg CR00312 | Total (singlets) | 97.98% |
| | CD34+CD38−CD45RA− | 98.66% |
| | CD34+CD38−CD45RA−CD90+CD49f− | 98.19% |
| | CD34+CD38−CD45RA−CD90−CD49f− | 98.70% |
| | CD34+CD38−CD45RA−CD90−CD49f+ | 98.81% |
| Dg | Total (singlets) | 97.62% |
| CR001128 | CD34+CD38−CD45RA− | 95.93% |
| | CD34+CD38−CD45RA−CD90−CD49f− | 98.00% |
| | CD34+CD38−CD45RA−CD90−CD49f+ | 99.01% |

### Example 9 Evaluation of Potential Off-Target Editing

[1075] HSPC Culture and CRISPR/Cas9 Genome Editing

[1076] Methods for RNP generation and cell manipulation are as in Example 4, with the following exceptions. Human CD34+ cell culture. Human CD34+ cells were either isolated from G-CSF mobilized peripheral blood from adult donors (AllCells, Cat. No. mPBO25-Reg.E) using immunoselection (Miltenyi) according to the manufacturer's instructions or derived from bone marrow (Hemacare Corporation, Cat. No. BM34C-3). CD34+ cells were thawed and expanded for 2 days or 5 days prior to RNP delivery. After RNP delivery, cells were either cultured for an additional 13 days in expansion medium or cultured in erythroid differentiation medium for 7 or 11 days as follows. During days 0-7 of culture, EDM was further supplemented with 1 μM hydrocortisone (Sigma H8672), 100 ng/mL human SCF (Life Technologies, Cat. #PHC2113), and 5 ng/mL human IL-3 (Peprotech #10779-598). During days 7-11 of culture, EDM was supplemented with 100 ng/mL of human SCF only. At the conclusion of the culture period, cells were harvested for genomic DNA preparation and analysis.

[1077] Assembly of Cas9 and guide RNA ribonucleoprotein (RNP) complexes, preparation of HSPC, and electroporation of RNP into HSPC. The HSPC collected by centrifugation were resuspended in P3 Primary Cell Solution (Lonza cat. No. PBP3-00675). The RNP was mixed with 20 μL of cells by pipetting up and down and incubated at RT for 2 min. The RNP/cell mixture (20 μL) was electroporated using code CM-137 on the 4D-Nucleofector (Lonza). dgRNAs comprising a crRNA having the sequence NNNNNNNNNNNNNNNNNNNNGUUUUAGAGCUAUGCUGUUUUG (SEQ ID NO: 2010) (where N indicates a residue of the indicated targeting domain) and a tracr having the sequence of SEQ ID NO: 6660 were used.

[1078] Genomic DNA Extraction

[1079] Genomic DNA was isolated from RNP treated and untreated HSPC using the DNeasy Blood & Tissue Kit (Qiagen, Cat #69506) following the manufacturer's recommendations.

[1080] In Silico Identification of Potential gRNA Off-Target Loci

[1081] Potential off-target loci for the BCL11A+58 region gRNAs CR00309, CR00311, CR00312, CR00316, CR001125, CR001126, CR001127, and CR001128, and the HPFH region gRNAs CR001028, CR001030, CR001137, CR001221, CR003035, and CR003085 were identified as follows. For each gRNA, the 20 nucleotide gRNA protospacer sequence was aligned to the human genome reference sequence (build GRCh38) using the BFAST sequence aligner (version 0.6.4f, Homer et al, PLoS One, 2009, 4(11), e7767, PMID: 19907642) using standard parameters allowing up to 5 nucleotide mismatches. Loci identified were filtered to only contain sites that are 5′ adjacent to the Cas9 canonical 5′-NGG-3′ PAM sequence (i.e. 5′-off-target locus-PAM-3′). Using the BEDTools script (version 2.11.2, Quinlan and Hall, Bioinformatics, 2010 26(6):841-2, PMID: 20110278) sites with 5 nucleotide mismatches were further filtered against RefSeq gene annotations (Pruitt et al, Nucleic Acids Res., 2014 42(Database issue):D756-63, PMID: 24259432) to only contain loci annotated as exons. Counts of the potential off-target loci identified for the BCL11A+58 region and the HPFH region gRNAs are shown in Tables 1 and 2 respectively.

TABLE 29
Counts of in silico off-target loci identified for the
BCL11A +58 region gRNAs CR00309, CR00311, CR00312,
CR00316, CR001125, CR001126, CR001127, and CR001128
with 0, 1, 2, 3 and 4 nucleotide mismatches and 5 nucleotide
mismatches within RefSeq exons are shown.

| gRNA | | | | | | | |
|---|---|---|---|---|---|---|---|
| targeting | Number of off-targets with N mismatches | | | | | | |
| domain ID | 0 | 1 | 2 | 3 | 4 | 5 RefSeq exons | Total sites |
| CR00309 | 0 | 0 | 2 | 9 | 77 | 52 | 140 |
| CR00311 | 0 | 0 | 3 | 13 | 213 | 38 | 267 |
| CR00312 | 0 | 0 | 0 | 6 | 126 | 33 | 165 |
| CR00316 | 0 | 0 | 0 | 22 | 234 | 90 | 346 |
| CR001125 | 0 | 0 | 1 | 16 | 221 | 83 | 321 |
| CR001126 | 0 | 0 | 2 | 26 | 235 | 86 | 349 |
| CR001127 | 0 | 0 | 1 | 35 | 331 | 157 | 524 |
| CR001128 | 0 | 0 | 0 | 9 | 156 | 42 | 207 |

TABLE 30
Counts of in silico off-target loci identified for the
HPFH region gRNAs CR001028, CR001030, CR001137,
CR001221, CR003035, and CR003085 with 0, 1, 2, 3
and 4 nucleotide mismatches and 5 nucleotide mismatches
within RefSeq exons are shown.

| gRNA | | | | | | | |
|---|---|---|---|---|---|---|---|
| targeting | Number of off-targets with N mismatches | | | | | | |
| domain ID | 0 | 1 | 2 | 3 | 4 | 5 RefSeq exons | Total sites |
| CR001028 | 0 | 0 | 1 | 11 | 154 | 67 | 233 |
| CR001030 | 0 | 0 | 0 | 14 | 125 | 85 | 224 |
| CR001137 | 0 | 0 | 1 | 6 | 85 | 21 | 113 |
| CR001221 | 0 | 0 | 2 | 17 | 166 | 44 | 229 |
| CR003035 | 0 | 0 | 4 | 10 | 158 | 77 | 249 |
| CR003085 | 0 | 0 | 0 | 5 | 75 | 16 | 96 |

[1082] PCR Primer Design for Targeted Amplification of Potential Off-Target Sites PCR amplicons targeting potential off-target loci (and the on-target locus) identified for the BCL11A+58 region gRNAs (CR00309, CR00311, CR00312, CR00316, CR001125, CR001126, CR001127, and CR001128) and the RPFH region gRNAs (CR001028, CR001030, CR001137, CR001221, CR003035, and CR003085) were design using Primer3 (version 2.3.6, Untergasser et al, Nucleic Acids Res., 2012 40(15):e115, PMID: 22730293) using default parameters aiming for an amplicon size range of approximately 160-300 base pairs in length with the gRNA protospacer sequence located in the center of the amplicon. For gRNA CR001127 PCR primers were only designed for sites with 0-4 nucleotide mismatches, no primers were designed for sites with 5 nucleotide mismatches within RefSeq exons. Resulting PCR primer pairs and amplicon sequences were checked for uniqueness by BLAST searching (version 2.2.19, Altschul et al, J Mol Biol., 1990, 215(3):403-10, PMID: 2231712) sequences against the human genome reference sequence (build GRCh38). Primer pairs resulting in more than one amplicon sequence were discarded and redesigned. Tables 3 and 5 show counts of successful PCR primer pairs designed for the BCL11A+58 region and the HPFH region gRNAs respectively.

[1083] Illumina Sequencing Library Preparation, Quantification and Sequencing

[1084] Genomic DNA from RNP treated (2 replicates per gRNA) and untreated (1 replicate per gRNA) HSPC samples was quantified using the Quant-iT PicoGreen dsDNA kit (Thermo Fisher, Cat #P7581) using manufacture's recommendations. Illumina sequencing libraries targeting individual off-target loci (and the on-target locus) were generated for each sample using two sequential PCR reactions. The first PCR amplified the target locus using target specific PCR primers (designed above) that were tailed with universal Illumina sequencing compatible sequences. The second PCR added additional Illumina sequencing compatible sequences to the first PCR amplicon, including sample barcodes to enable multiplexing during sequencing. PCR 1 was performed in a final volume of 10 μL with each reaction containing 3-6 ng of gDNA (equivalent to approximately 500-1000 cells), PCR 1 primer pairs (Integrated DNA Technologies) at a final concentration of 0.25 μM and 1× final concentration of Q5 Hot Start Master Mix (New England BioLabs, Cat #102500-140). PCR 1 left primers were 5′ tailed (i.e. 5′-tail-target specific left primer-3′) with sequence 5′-TCGTCGGCAGCGTCAGATGTGTATAAGAGACAG-3′ (SEQ ID NO: 2819) and right primers were 5′ tailed (i.e. 5′-tail-target specific right primer-3′) with sequence 5′-GTCTCGTGGGCTCGGAGATGTGTATAAGAGACAG-3′ (SEQ ID NO: 2820). PCR 1 was performed on a thermocycler using the following cycling conditions: 1 cycle of 98° C. for 1 min; 25 cycles of 98° C. for 10 sec, 63° C. for 20 sec, and 72° C. for 30 sec; 1 cycle at 72° C. for 2 min. PCR 1 was then diluted 1 in 100 using nuclease free water (Ambion, Cat #AM9932) and used as input into PCR 2. PCR 2 was performed in a final volume of 10 μL with each reaction containing 2 μL of diluted PCR 1 product, PCR 2 primer pairs (Integrated DNA Technologies) at a final concentration of 0.5 μM and 1× final concentration of Q5 Hot Start Master Mix (New England BioLabs, Cat #102500-140). PCR 2 left primer sequence used was 5′-AATGATACGGCGACCACCGAGATCTACACNNNNNNNNTCGTCGGCAGCGTC-3′ (SEQ ID NO: 2821) and PCR 2 right primer sequence used was 5′-CAAGCAGAAGACGGCATACGAGATNNNNNNNNGTCTCGTGGGCTCGG-3′ (SEQ ID NO: 2822) where the NNNNNNNN denote an 8 nucleotide barcode sequence used for sample multiplexing as part of the standard Illumina sequencing process. PCR 2 was performed on a thermocycler using the following cycling conditions: 1 cycle of 72° C. for 3 min; 1 cycle of 98° C. for 2 min; 15 cycles of 98° C. for 10 sec, 63° C. for 30 sec, and 72° C. for 2 min. PCR 2 amplicons, now viable Illumina sequencing libraries, were cleaned up using Agencourt AMPure XP beads (Beckman Coulter, Cat #A63882) following the manufacture's recommendations. The cleaned Illumina sequencing libraries were then quantified using standard qPCR quantification methods using Power SYBR Green PCR master mix (Life Technologies, Cat #4367660) and primers specific to the Illumina sequencing library ends (forward primer sequence 5′-CAAGCAGAAGACGGCATACGA-3′ (SEQ ID NO: 2823) and reverse primer sequence 5′-AATGATACGGCGACCACCGAGA-3′ (SEQ ID NO: 2824)). Illumina sequencing libraries were then pooled equimolar and subjected to Illumina sequencing on a MiSeq instrument (Illumina, Cat #SY-410-1003) with 300 base paired-end reads using a MiSeq Reagent Kit v3 (Illumina, Cat #MS-102-3003) following the manufacture's recommendations. A minimum of 1000-fold sequence coverage was generated for each locus for at least one treated replicate. PCR, cleanup, pooling and sequencing of treated and untreated samples were performed separately to avoid any possibility of cross contamination between treated and untreated samples or PCR amplicons generated therefrom.

[1085] Illumina Sequencing Data QC and Variant Analysis

[1086] Using default parameters, the Illumina MiSeq analysis software (MiSeq reporter, version 2.6.2, Illumina) was used to generate amplicon specific FASTQ sequencing data files (Cock et al, Nucleic Acids Res. 2010, 38(6):1767-71, PMID: 20015970). FASTQ files were then processed through an internally developed variant analysis pipeline consisting of a series of public domain software packages joined together using a standard Perl script wrapper. The workflow used was divided into five stages.

[1087] Stage 1, PCR primer and on- and off-target sequence QC: For both on- and off-target sites the 20 nucleotide gRNA protospacer sequence plus PAM sequence and target specific PCR primer sequences (left and right without the additional Illumina sequences) were aligned to the human genome reference sequence (build GRCh38) using a BLAST search (version 2.2.29+, Altschul et al, J Mol Biol., 1990, 215(3):403-10, PMID: 2231712). On- and off-target sites with multiple genomic locations were flagged.

[1088] Stage 2, sequencer file decompression: Illumina sequencer generated FASTQ.GZ files were decompressed to FASTQ files using the gzip script (version 1.3.12) and number of reads per file was calculated. Files with no reads were excluded from further analysis.

[1089] Stage 3, sequence read alignment and quality trimming: Sequencing reads in FASTQ files were aligned to the human genome reference sequence (build GRCh38) using the BWA-MEM aligner (version 0.7.4-r385, Li and Durbin, Bioinformatics, 2009, 25(14):1754-60, PMID: 19451168) using ‘hard-clipping’ to trim 3′ ends of reads of Illumina sequences and low quality bases. Resulting aligned reads, in the BAM file format (Li et al, Bioinformatics, 2009 25(16):2078-9, PMID: 19505943), were converted to FASTQ files using the SAMtools script (version 0.1.19-44428cd, Li et al, Bioinformatics, 2009 25(16):2078-9, PMID: 19505943). FASTQ files were then aligned again to the human genome reference sequence (build GRCh38) using the BWA-MEM aligner, this time without ‘hard-clipping’.

[1090] Stage 4, variant (SNP and INDEL) analysis: BAM files of aligned reads were processed using the VarDict variant caller (version 1.0 ‘Cas9 aware’ modified by developer ZhangWu Lia, Lai et al, Nucleic Acids Res., 2016, 44(11):e108, PMID: 27060149) with allele frequency detection limit set at >=0.0001 to identify variants (SNPs and INDELs). The Cas9 aware VarDict caller is based on a public domain package but able to move ambiguous variant calls, generated due to repetitive sequences in the alignment region of the variant events, toward the potential Cas9 nuclease cut site in the gRNA protospacer sequence located 3 bases 5′ of the PAM sequence. The SAMtools script was used to calculate read coverage per sample amplicon to determine whether the on- and off-target sites were covered at >1000-fold sequence coverage. Sites with <1000-fold sequence coverage were flagged.

[1091] Stage 5, dbSNP filtering and treated/untreated differential analysis: Variants identified were filtered for known variants (SNPs and INDELs) found in dbSNP (build 142, Shery et al, Nucleic Acids Res. 2001, 29(1):308-11, PMID: 11125122). Variants in the treated samples were further filtered to exclude: 1) variants identified in the untreated control samples; 2) variants with a VarDict strand bias of 2:1 (where forward and reverse read counts supporting the reference sequence are balanced but imbalanced for the non-reference variant call); 3) variants located outside a 100 bp window around the potential Cas9 cut site; 4) single nucleotide variants within a 100 bp window around the potential Cas9 cut site. Finally only sites with a combined INDEL frequency of >2% (editing in more than approximately 10-20 cell) in a 100 bp window of the potential Cas9 cut site were considered. Potential active editing sites were further examined at the read alignment level using the Integrative Genome Viewer (IGV version 2.3, Robinson et al, Nat Biotechnol. 2011, 9(1):24-6, PMID: 21221095) that allows for visual inspection of read alignments to the genome reference sequence.

[1092] On- and Off-Target Analysis Results

[1093] On-target sites for the BCL11A+58 region and the HPFH region gRNAs showed robust editing at the intended Cas9 cut site in treated samples with an INDEL frequency greater than 88% for all gRNAs. Tables 3 and 5 show number of off-target sites characterized in at least one biological replicate. Uncharacterized sites failed PCR primer design or PCR amplification and remain under investigation.

[1094] BCL11A+58 Region in Silico Targeted Analysis Results

[1095] gRNA CR00309: The on-target site for gRNA CR00309 showed robust editing at the intended Cas9 cut site with an average INDEL frequency of approximately 92%. Table 31 shows the number of off-target sites characterized. Uncharacterized sites failed in PCR primer design or PCR amplification and remain under investigation. Characterization of potential off-target sites identified four off-target sites in the 100 bp window around the proposed Cas9 cut site in both treated replicates. Site 1 has an average INDEL frequency approximately 18%, has 3 mismatches relative to the on-target gRNA protospacer sequence (5′-CtCaCCtCCACCCTAATCAG-PAM-3′, PAM=AGG (SEQ ID NO: 2825)) and is located in intron 1 of the Anoctamin 5 gene (ANO5), on chromosome 11 at base pair position 22,195,800-22,195,819, approximately 2.3 kb away from exon 1. Site 2 has an average INDEL frequency of approximately 18%, has 2 mismatches relative to the on-target gRNA protospacer sequence (5′-CACGCCCaCACCtTAATCAG-PAM-3′, PAM=GGG (SEQ ID NO: 2826)) and is located in an intergenic region of chromosome 12 at base pair position 3,311,901-3,311,926. Site 3 has an average INDEL frequency approximately 80%, has 2 mismatches relative to the on-target gRNA protospacer sequence (5′-CACGaCCCaACCCTAATCAG-PAM-3′, PAM=AGG (SEQ ID NO: 2827)) and is located in a GenBank (Clark et al., Nucleic Acids Res. 2016 Jan. 4; 44(Database issue): D67-D72, PMID: 26590407) transcript (BC012501 not annotated in RefSeq) on chromosome 1 at base pair position 236,065,415-236,065,434. Site 4 has an average INDEL frequency of approximately 2%, has 4 mismatches relative to the on-target gRNA protospacer sequence (5′-CtaGCCCCtACCCTAATaAG-3′, PAM=TGG (SEQ ID NO: 2828)) and is located in intron 1 of a GenBank annotated transcript called polyhomeotic 2 protein (not annotated in RefSeq) on chromosome 1 at base pair position 33,412,659-33,412,678.

[1096] gRNA CR00311: The on-target site for gRNA CR00311 showed robust editing at the intended Cas9 cut site with an average INDEL frequency of approximately 95%. Table 31 shows the number of off-target sites successfully characterized. Uncharacterized sites failed in PCR primer design or PCR amplification and remain under investigation. To date no significant off-target activity was observed at sites examined.

[1097] gRNA CR000312: The on-target site for gRNA CR000312 showed robust editing at the intended Cas9 cut site with an average INDEL frequency of approximately 98%. Table 31 shows the number of off-target sites successfully characterized. Uncharacterized sites failed in PCR primer design or PCR amplification and remain under investigation. To date no significant off-target activity was observed at sites examined.

[1098] gRNA CR000316: The on-target site for gRNA CR000316 showed robust editing at the intended Cas9 cut site in with an average INDEL frequency of approximately 91%, however the majority of off-target sites remain to be characterized.

[1099] gRNA CR001125: The on-target site for gRNA CR0001125 showed robust editing at the intended Cas9 cut site with an average INDEL frequency of approximately 91%. Table 31 shows the number of off-target sites successfully characterized. Uncharacterized sites failed in PCR primer design or PCR amplification and remain under investigation. To date no significant off-target activity was observed at sites examined.

[1100] gRNA CR001126: The on-target site for gRNA CR0001126 showed robust editing at the intended Cas9 cut site with an average INDEL frequency of approximately 92%. Table 31 shows the number of off-target sites successfully characterized. Uncharacterized sites failed in PCR primer design or PCR amplification and remain under investigation. Characterization of potential off-target sites identified two off-target sites to date in the 100 bp window around the proposed Cas9 cut site in both treated replicates. The first site has an average INDEL frequency approximately 2%, has 2 mismatches relative to the on-target gRNA protospacer sequence (5′-TTTATaACAGGCTCCAGaAA-PAM-3′, PAM=TGG (SEQ ID NO: 2829)) and is located in an intergenic region on chromosome 4 at base pair position 35,881,815-35,881,834, approximately 9.5 kb away from the nearest GenBank transcript (not annotated in RefSeq). The second site has an average INDEL frequency of approximately 1.7%, has 4 mismatches relative to the on-target gRNA protospacer sequence (5′caTATCACAGGCcCCAGGAg-PAM-3′, PAM=GGG (SEQ ID NO: 2830)) and is located in intron 6 of the Ataxin 1 gene (ATXN1), on chromosome 6 at base pair position 16,519,907-16,519,926, approximately 2.7 kb away from exon 6.

[1101] gRNA CR001127: The on-target site for gRNA CR0001127 showed robust editing at the intended Cas9 cut site with an average INDEL frequency of approximately 97%. Table 31 shows the number of off-target sites successfully characterized. Uncharacterized sites failed in PCR primer design or PCR amplification and remain under investigation. To date no significant off-target activity was observed at sites examined.

[1102] gRNA CR001128: The on-target site for gRNA CR0001128 showed robust editing at the intended Cas9 cut site with an average INDEL frequency of approximately 94%. Table 31 shows the number of off-target sites successfully characterized. Uncharacterized sites failed in PCR primer design or PCR amplification and remain under investigation. To date no significant off-target activity was observed at sites examined.

[1103] Manual inspection of all actively edited BCL11 +58 region off-target sites identified showed typical INDEL patterns surrounding the proposed Cas9 cut site typical of Cas9 mediated double stranded break non homologous end joining DNA repair. It is unclear whether editing at the sites identified has any detrimental effect on gene expression or cell viability, further analysis is required.

TABLE 31
Counts of in silico off-target sites identified, sites successfully
characterized in at least one treated replicate and sites that show
editing for the BCL11A +58 region gRNAs CR00309, CR00311,
CR00312, CR00316, CR001125, CR001126, CR001127, and
CR001128 are shown.

| | Total | Number of in | |
|---|---|---|---|
| | number of | silico off- | Number |
| | in silico | target sites | of active in silico |
| gRNA name | off-target sites | characterized | off-target sites identified |
| CR00309 | 141 | 140 | 4 |
| CR00311 | 267 | 245 | 0 |
| CR00312 | 165 | 163 | 0 |
| CR00316 | 346 | TBD | TBD |
| CR001125 | 321 | 319 | 0 |
| CR001126 | 349 | 348 | 2 |
| CR001127* | 367 | 365 | 0 |
| CR001128 | 207 | 194 | 0 |

*only sites with 0-4 nucleotide mismatches were examined.

[1104] BCL11A+58 Region GUIDE-Seq Hit Validation Results

[1105] Potential off-target hits identified by GUIDE-seq (Tsai et al, Nat Biotechnol. 2015, 33(2):187-97, PMID: 25513782) were characterized in RNP treated and untreated HSPC using targeted sequencing methods described above for in silico defined sites. GUIDE-seq potential hits were identified for gRNAs CR00312, CR00316, CR001125, CR001126, CR001127 and CR001128. No potential hits were identified for gRNA CR00311 and CR001128. When the potential hits were interrogated in HSPCs using targeted sequencing, none of the potential hits validated in treated HSPC for gRNA CR00312, CR001125 and CR001127. One potential hit validated for gRNA CR001126, the same site that was identified by the in silico directed method in intron 6 of ATXN1 (chromosome 6: 16,519,907-16,519,926 base pairs). Validation of potential hits for gRNAs CR00309 and CR00316 is still in progress.

[1106] HPFH Region in Silico Targeted Analysis Results

[1107] gRNA CR001028: The on-target site for gRNA CR0001028 showed robust editing at the intended Cas9 cut site with an average INDEL frequency of approximately 91%. Table 32 shows the number of off-target sites successfully characterized. Uncharacterized sites failed in PCR primer design or PCR amplification and remain under investigation. Characterization of potential off-target sites identified two off-target sites to date in the 100 bp window around the proposed Cas9 cut site in both treated replicates. Site 1 has an average INDEL frequency approximately 2.8%, has 2 mismatches relative to the on-target gRNA protospacer sequence (5′-TGgGGTGGGGAGATATGaAG-PAM-3′, PAM=AGG (SEQ ID NO: 2831)) and is located in intron 2 of a non-coding RNA (LF330410, not annotated in RefSeq) located on chromosome 4 at base pair position 58,169,308-58,169,327. Site 2 has an average INDEL frequency approximately 3.5%, has 3 mismatches relative to the on-target gRNA protospacer sequence (5′-gGaGGTGGGGAGAgATGTAG-PAM-3′, PAM=AGG (SEQ ID NO: 2832)) and is located in intron 1 of the Butyrophilin subfamily 3 member A2 gene (BTN3A2) located on chromosome 6 at base pair position 26,366,733-26,366,752, approximately 1.3 kb from exon 2.

[1108] gRNA CR001030: The on-target site for gRNA CR0001030 showed robust editing at the intended Cas9 cut site with an average INDEL frequency of approximately 89%. Table 32 shows the number of off-target sites successfully characterized. Uncharacterized sites failed in PCR primer design or PCR amplification and remain under investigation. Characterization of potential off-target sites identified one off-target sites to date with average INDEL frequency of 57% in the 100 bp window around the proposed Cas9 cut site in both treated replicates. The site has 3 mismatches relative to the on-target gRNA protospacer sequence (5′-caTGCgGAAAGAGATGCGGT-PAM-3′, PAM=TGG (SEQ ID NO: 2833)) and is located in exon 4 of the Pyruvate Dehydrogenase Kinase 3 gene (PDK3) located on the X chromosome at base pair position 24,503,476-24,503,495.

[1109] gRNA CR001137: The on-target site for gRNA CR0001037 showed robust editing at the intended Cas9 cut site with an average INDEL frequency of approximately 84%. Table 32 shows the number of off-target sites successfully characterized. Uncharacterized sites failed in PCR primer design or PCR amplification and remain under investigation. To date no significant off-target activity was observed at sites examined.

[1110] gRNA CR001221: The on-target site for gRNA CR0001221 showed robust editing at the intended Cas9 cut site with an average INDEL frequency of approximately 95%. Table 32 shows the number of off-target sites successfully characterized. Uncharacterized sites failed in PCR primer design or PCR amplification and remain under investigation. To date no significant off-target activity was observed at sites examined.

[1111] gRNA CR003035: The on-target site for gRNA CR0003035 showed robust editing at the intended Cas9 cut site with an average INDEL frequency of approximately 89%. Table 32 shows the number of off-target sites successfully characterized. Uncharacterized sites failed in PCR primer design or PCR amplification and remain under investigation. Characterization of potential off-target sites identified two off-target sites to date in the 100 bp window around the proposed Cas9 cut site in both treated replicates. Site 1 has an average INDEL frequency of approximately 20%, has 2 mismatches relative to the on-target gRNA protospacer sequence (5′-AGGtACCTCAaACTCAGCAT-PAM-3′, PAM=AGG (SEQ ID NO: 2834)) and is located in an intergenic region on chromosome 2 at base pair position 66,281,781-66,281,800 and is approximately 7.1 kb from the nearest transcript (JD432564, not annotated in RefSeq). Site 2 has an average INDEL frequency approximately 2.5%, has 3 mismatches relative to the on-target gRNA protospacer sequence (5′-AGagACCcCAGACTCAGCAT-PAM-3′, PAM=AGG (SEQ ID NO: 2835)) and is located in an intergenic region on chromosome 10 at base pair position 42,997,289-42,997,308, and is approximately 0.3 kb from MicroRNA 5100 (MIR5100).

[1112] gRNA CR003085: The on-target site for gRNA CR0003038 showed robust editing at the intended Cas9 cut site with an average INDEL frequency of approximately 94%. Table 32 shows the number of off-target sites successfully characterized. Uncharacterized sites failed in PCR primer design or PCR amplification and remain under investigation. Characterization of potential off-target sites identified one off-target sites to date with average INDEL frequency of approximately 2% in the 100 bp window around the proposed Cas9 cut site in both treated replicates. The site has 3 mismatches relative to the on-target gRNA protospacer sequence (5′-ATGGTATGaGAaaTATACTA-PAM-3′, PAM=TGG (SEQ ID NO: 2836)) and is located in intron 2 of the Solute Carrier Family 25 Member 12 gene (SLC25A12) located on chromosome 2 at base pair position 171,872,630-171,872,649, and is approximately 3.8 kb from exon 3.

[1113] Manual inspection of all actively edited HPFH region off-target sites identified showed typical INDEL patterns surrounding the proposed Cas9 cut site typical of Cas9 mediated double stranded break non homologous end joining DNA repair. It is unclear whether editing at the sites identified has any detrimental effect on gene expression or cell viability, further analysis is required.

TABLE 32
Counts of potential in silico off-target sites identified, sites successfully
characterized in at least one treated replicate and sites that show
editing for the HPFH region gRNAs CR001028, CR001030,
CR001137, CR001221, CR003035 and CR003085 are shown.

| | | Number of in | |
|---|---|---|---|
| | Total number | silico off- | Number of |
| | of in silico | target sites | active in silico |
| gRNA name | off-target sites | characterized | off-target sites identified |
| CR001028 | 233 | 217 | 2 |
| CR001030 | 224 | 219 | 1 |
| CR001137 | 113 | 109 | 0 |
| CR001221 | 229 | 224 | 0 |
| CR003035 | 249 | 243 | 2 |
| CR003085 | 96 | 95 | 1 |

[1114] HPFH Region GUIDE-Seq Hit Validation Results

[1115] Potential off-target hits identified using GUIDE-seq (Tsai et al, Nat Biotechnol. 2015, 33(2):187-97, PMID: 25513782) were interrogated in RNP treated and untreated HSPC using the same methods described for in silico sites. GUIDE-seq potential off-target hits were identified for gRNA CR001028, CR001030, CR003035 and CR003085 (to date). No hits were identified for gRNAs CR001137 and CR001221 to date. One hit for gRNA CR001028 validated in HSPC, the same site that was identified by the in silico directed method on chromosome 4 at base pair position 58,169,308-58,169,327. One hit validated for gRNA CR001030 in HSPC, the same site that was identified by the in silico directed method in exon 4 of the PDK3 gene. One hit validated for gRNA CR003035 in HSPC, the same site that was identified by the in silico directed method in the intergenic region of chromosome 2 at base pair position 66,281,781-66,281,800. One hit validated for gRNA CR003085 in HSPC, the same site as was identified by the in silico directed method on chromosome 2 at base pair position 171,872,630-171,872,649.

[1116] On-Target Analysis for gRNA Editing Efficiency Screening

[1117] PCR amplicons targeting the gRNA on-target site were cleaned up using Agencourt AMPure XP beads (Beckman Coulter, Cat #A63882) following the manufacture's recommendations. Samples were quantified using the Quant-iT PicoGreen dsDNA kit (Thermo Fisher, Cat #P7581) using manufacture's recommendations. Amplicons were transformed into Illumina sequencing libraries using the Nextera DNA Library Preparation Kit (Illumina, Cat #FC-121-1031) following the manufacture's recommendations. Resulting sequencing libraries were AMPure bead cleaned up, qPCR quantified, pooled and sequenced with an Illumina MiSeq instrument using 150 base (Illumina, Cat #MS-102-2002) or 250 base (Illumina, Cat #MS-102-2003) paired-end reads as described in the off-target analysis section. For each library a minimum of a 1000-fold sequencing coverage was generated and variants were called using a series of in house scripts. In short, sequencing reads spanning an 80-100 base pair window centered on the gRNA sequence were identified using a string based sequence search, compared to the amplicon sequence, binned by sequence differences and variant frequencies were calculated. Additionally, sequencing reads were aligned to the amplicon sequence using the Illumina MiSeq reporter software (Illumina version 2.6.1) and resulting read alignments were examined using the Integrative Genome Viewer (IGV version 2.3, Robinson et al, Nat Biotechnol. 2011, 9(1):24-6, PMID: 21221095).

### Example 10: Evaluation of RNP Concentration on Gene Editing and HbF Induction

[1118] RNP Dilution Assay to Determine Optimal RNP Concentration for Gene Editing

[1119] Gene editing was performed using a serial dilution of Cas9 (iProt: 106331) and guide ribonucleotide complexes (RNP) concentrations (Table 33). Various gRNA used, their formats, and modification applied in this assay are listed in Table 34.

TABLE 33
RNP dilution used to investigate RNP concentration effect
on gene editing and HbF induction.

| | | RNP | RNP | RNP | RNP | RNP |
|---|---|---|---|---|---|---|
| gRNA | RNP | Conc | Conc | Conc | Conc | Conc |
| Format | Components | RNP-1 | RNP-2 | RNP-3 | RNP-4 | RNP-5 |
| Single | crRNA (ug) | 3 | 1.5 | 0.75 | 0.37 | 0.18 |
| gRNA | Cas9 (ug) | 3 | 1.5 | 0.75 | 0.37 | 0.18 |
| | RNP (uM) | 1.94 | 0.97 | 0.48 | 0.24 | 0.12 |
| Dual | crRNA (ug) | 3.86 | 1.93 | 0.97 | 0.48 | 0.24 |
| gRNA | tracrRNA (ug) | 3.86 | 1.93 | 0.97 | 0.48 | 0.24 |
| | Cas9 (ug) | 3.86 | 1.93 | 0.97 | 0.48 | 0.24 |
| | RNP (uM) | 5.89 | 2.94 | 1.47 | 0.74 | 0.37 |

TABLE 34
List of gRNAs, in single or dual guide format, with or without chemical
modification used in the RNP dilution assay. “OMePS” modification,
with respect to dgRNA format, refers to modified crRNA having
the following structure:
mN*mN*mN*NNNNNNNNNNNNNNNNNGUUUUAGAGCUAUGC
UGUU*mU*mU*mG paired with unmodified tracr (i.e., tracrRNA)
of SEQ ID NO: 6660; and with respect to sgRNA, refers to a
gRNA having the following structure:
mN*mN*mN*NNNNNNNNNNNNNNNNNGUUUUAGAGCUAGAAA
UAGCAAGUUAAAAUAAGGCUAGUCCGUUAUCAACUUGAAA
AAGUGGCACCGAGUCGGUGCmU*mU*mU*U, where
N = a nucleotide
of the targeting domain, mN refers to a 2′-OMe-modified nucelotide, and *
refers to a phosphorothioate bond. “Unmodified” refers to a gRNA
having no RNA modifications: dgRNA consist of NNNNNNNNNNNNN
NNNNNNNGUUUUAGAGCUAUGCUGUUUUG paired with SEQ ID
NO: 6660; sgRNA refer to
NNNNNNNNNNNNNNNNNNNNGUUUUAGAGCUAGAAAUAGCA
AGUUAAAAUAAGGCUAGUCCGUUAUCAACUUGAAAAAGUG
GCACCGAGUCGGUGCUUUU, where N = the
nucleotides of the indicated targeting domain

| gRNA | | gRNA Targeting | |
|---|---|---|---|
| Format | Sample ID | Domain ID | gRNA Modification |
| Dual gRNA | 1 | CR00312 | Unmodified |
| | 2 | CR001128 | Unmodified |
| | 3 | CR00312 | OMePS |
| | 4 | CR001128 | OMePS |
| Single gRNA | 5 | CR00312 | Unmodified |
| | 6 | CR001128 | Unmodified |
| | 7 | CR00312 | OMePS |
| | 8 | CR001128 | OMePS |
| | 9 | Mock electroporation | N/A |
| | | control | |

[1120] CD34+ cells were electroporated as described previously, and subjected to measurement of cell viability, gene editing efficiency, and ability to produce HbF. When assessing cell viability, the results showed that varying RNP concentration had no impact on cell viability upon electroporation, either when single or dual guide format is used (FIG. 39A and FIG. 39B). Upon gene editing of CD34+ cells, NGS data showed that RNP concentrations down to 1.47 uM achieved maximum % gene editing efficiency for unmodified CR00312 and CR001128, and modified CR00312, while maximum % gene editing efficiency for modified CR001228 was achieved at RNP concentrations as low as 2.94 uM (FIG. 40A). For sgRNA formats, all gRNAs tested achieved maximum % editing at RNP concentrations down to 0.48 uM (FIG. 40B). In measuring the ability of gene edited cells to differentiate into erythroid lineage and produce HbF, our data showed that the RNP concentration down to 2.94 uM for dgRNA-containing RNP (FIG. 41A) and down to 0.97 uM for sgRNA-containing RNP (FIG. 41B) resulted in maximum levels of HbF induction.

[1121] This application is being filed with a sequence listing. To the extent there are any discrepancies between the sequence listing and any sequence recited in the specification, the sequence recited in the specification should be considered the correct sequence. Unless otherwise indicated, all genomic locations are according to hg38.

### INCORPORATION BY REFERENCE

[1122] All publications, patents, and patent applications mentioned herein are hereby incorporated by reference in their entirety as if each individual publication, patent or patent application was specifically and individually indicated to be incorporated by reference. In case of conflict, the present application, including any definitions herein, will control.

### EQUIVALENTS

[1123] Those skilled in the art will recognize, or be able to ascertain using no more than routine experimentation, many equivalents to the specific embodiments of the invention described herein. While this invention has been disclosed with reference to specific aspects, it is apparent that other aspects and variations of this invention may be devised by others skilled in the art without departing from the true spirit and scope of the invention. The appended claims are intended to be construed to include all such aspects and equivalent variations.

The application's sequence listing, which the Patent Office published only in electronic form, follows.

SEQUENCE LISTING (7839 sequences)

SEQ ID NO: 1 - RNA, 20 nt, synthetic construct
  misc_feature 1..20: note = Description of Artificial Sequence: Synthetic oligonucleotide
  source 1..20: mol_type = other RNA
acaggccgtgaacctaagtg

SEQ ID NO: 2 - RNA, 20 nt, synthetic construct
  misc_feature 1..20: note = Description of Artificial Sequence: Synthetic oligonucleotide
  source 1..20: mol_type = other RNA
tagaggggggaaattatagg

SEQ ID NO: 3 - RNA, 20 nt, synthetic construct
  misc_feature 1..20: note = Description of Artificial Sequence: Synthetic oligonucleotide
  source 1..20: mol_type = other RNA
cgagcggtaaatcctaaaga

SEQ ID NO: 4 - RNA, 20 nt, synthetic construct
  misc_feature 1..20: note = Description of Artificial Sequence: Synthetic oligonucleotide
  source 1..20: mol_type = other RNA
agacaaattcaaatcctgca

SEQ ID NO: 5 - RNA, 20 nt, synthetic construct
  misc_feature 1..20: note = Description of Artificial Sequence: Synthetic oligonucleotide
  source 1..20: mol_type = other RNA
gcttttggtggctaccatgc

SEQ ID NO: 6 - RNA, 20 nt, synthetic construct
  misc_feature 1..20: note = Description of Artificial Sequence: Synthetic oligonucleotide
  source 1..20: mol_type = other RNA
aatttatgccatctgataag

SEQ ID NO: 7 - RNA, 20 nt, synthetic construct
  misc_feature 1..20: note = Description of Artificial Sequence: Synthetic oligonucleotide
  source 1..20: mol_type = other RNA
tgttcctcctacccacccga

SEQ ID NO: 8 - RNA, 20 nt, synthetic construct
  misc_feature 1..20: note = Description of Artificial Sequence: Synthetic oligonucleotide
  source 1..20: mol_type = other RNA
ataaatgttggagctttagg

SEQ ID NO: 9 - RNA, 20 nt, synthetic construct
  misc_feature 1..20: note = Description of Artificial Sequence: Synthetic oligonucleotide
  source 1..20: mol_type = other RNA
caacctaattacctgtattg

SEQ ID NO: 10 - RNA, 20 nt, synthetic construct
  misc_feature 1..20: note = Description of Artificial Sequence: Synthetic oligonucleotide
  source 1..20: mol_type = other RNA
cgctgtcatgagtgatgccc

SEQ ID NO: 11 - RNA, 20 nt, synthetic construct
  misc_feature 1..20: note = Description of Artificial Sequence: Synthetic oligonucleotide
  source 1..20: mol_type = other RNA
ggcatcactcatgacagcga

SEQ ID NO: 12 - RNA, 20 nt, synthetic construct
  misc_feature 1..20: note = Description of Artificial Sequence: Synthetic oligonucleotide
  source 1..20: mol_type = other RNA
agtcccatagagagggcccg

SEQ ID NO: 13 - RNA, 20 nt, synthetic construct
  misc_feature 1..20: note = Description of Artificial Sequence: Synthetic oligonucleotide
  source 1..20: mol_type = other RNA
actgattcactgttccaatg

SEQ ID NO: 14 - RNA, 20 nt, synthetic construct
  misc_feature 1..20: note = Description of Artificial Sequence: Synthetic oligonucleotide
  source 1..20: mol_type = other RNA
aggactctgtcttcgcacaa

SEQ ID NO: 15 - RNA, 20 nt, synthetic construct
  misc_feature 1..20: note = Description of Artificial Sequence: Synthetic oligonucleotide
  source 1..20: mol_type = other RNA
ccacgctgacgtcgactggg

SEQ ID NO: 16 - RNA, 20 nt, synthetic construct
  misc_feature 1..20: note = Description of Artificial Sequence: Synthetic oligonucleotide
  source 1..20: mol_type = other RNA
gttcttcacacacccccatt

SEQ ID NO: 17 - RNA, 20 nt, synthetic construct
  misc_feature 1..20: note = Description of Artificial Sequence: Synthetic oligonucleotide
  source 1..20: mol_type = other RNA
gcgcttctccacaccgcccg

SEQ ID NO: 18 - RNA, 20 nt, synthetic construct
  misc_feature 1..20: note = Description of Artificial Sequence: Synthetic oligonucleotide
  source 1..20: mol_type = other RNA
gtctggagtctccgaagcta

SEQ ID NO: 19 - RNA, 20 nt, synthetic construct
  misc_feature 1..20: note = Description of Artificial Sequence: Synthetic oligonucleotide
  source 1..20: mol_type = other RNA
aaagatcccttccttagctt

SEQ ID NO: 20 - RNA, 20 nt, synthetic construct
  misc_feature 1..20: note = Description of Artificial Sequence: Synthetic oligonucleotide
  source 1..20: mol_type = other RNA
tcgccggctacgcggcctcc

SEQ ID NO: 21 - RNA, 20 nt, synthetic construct
  misc_feature 1..20: note = Description of Artificial Sequence: Synthetic oligonucleotide
  source 1..20: mol_type = other RNA
cggagaacgtgtactcgcag

SEQ ID NO: 22 - RNA, 20 nt, synthetic construct
  misc_feature 1..20: note = Description of Artificial Sequence: Synthetic oligonucleotide
  source 1..20: mol_type = other RNA
gagcttgatgcgcttagaga

SEQ ID NO: 23 - RNA, 20 nt, synthetic construct
  misc_feature 1..20: note = Description of Artificial Sequence: Synthetic oligonucleotide
  source 1..20: mol_type = other RNA
ccccccgaggccgactcgcc

SEQ ID NO: 24 - RNA, 20 nt, synthetic construct
  misc_feature 1..20: note = Description of Artificial Sequence: Synthetic oligonucleotide
  source 1..20: mol_type = other RNA
caccatgccctgcatgacgt

SEQ ID NO: 25 - RNA, 20 nt, synthetic construct
  misc_feature 1..20: note = Description of Artificial Sequence: Synthetic oligonucleotide
  source 1..20: mol_type = other RNA
gagagcgagagggtggacta

SEQ ID NO: 26 - RNA, 20 nt, synthetic construct
  misc_feature 1..20: note = Description of Artificial Sequence: Synthetic oligonucleotide
  source 1..20: mol_type = other RNA
cacggacttgagcgcgctgc

SEQ ID NO: 27 - RNA, 20 nt, synthetic construct
  misc_feature 1..20: note = Description of Artificial Sequence: Synthetic oligonucleotide
  source 1..20: mol_type = other RNA
gcccaccaagtcgctggtgc

SEQ ID NO: 28 - RNA, 20 nt, synthetic construct
  misc_feature 1..20: note = Description of Artificial Sequence: Synthetic oligonucleotide
  source 1..20: mol_type = other RNA
cccaccaagtcgctggtgcc

SEQ ID NO: 29 - RNA, 20 nt, synthetic construct
  misc_feature 1..20: note = Description of Artificial Sequence: Synthetic oligonucleotide
  source 1..20: mol_type = other RNA
ggcggtggagagaccgtcgt

SEQ ID NO: 30 - RNA, 20 nt, synthetic construct
  misc_feature 1..20: note = Description of Artificial Sequence: Synthetic oligonucleotide
  source 1..20: mol_type = other RNA
gccgcagaactcgcatgact

SEQ ID NO: 31 - RNA, 20 nt, synthetic construct
  misc_feature 1..20: note = Description of Artificial Sequence: Synthetic oligonucleotide
  source 1..20: mol_type = other RNA
ccgcccccaggcgctctatg

SEQ ID NO: 32 - RNA, 20 nt, synthetic construct
  misc_feature 1..20: note = Description of Artificial Sequence: Synthetic oligonucleotide
  source 1..20: mol_type = other RNA
tgggggtccaagtgatgtct

SEQ ID NO: 33 - RNA, 20 nt, synthetic construct
  misc_feature 1..20: note = Description of Artificial Sequence: Synthetic oligonucleotide
  source 1..20: mol_type = other RNA
ctcaacttacaaataccctg

SEQ ID NO: 34 - RNA, 20 nt, synthetic construct
  misc_feature 1..20: note = Description of Artificial Sequence: Synthetic oligonucleotide
  source 1..20: mol_type = other RNA
agtgcagaatatgccccgca

SEQ ID NO: 35 - RNA, 20 nt, synthetic construct
  misc_feature 1..20: note = Description of Artificial Sequence: Synthetic oligonucleotide
  source 1..20: mol_type = other RNA
gcatattctgcactcatccc

SEQ ID NO: 36 - RNA, 20 nt, synthetic construct
  misc_feature 1..20: note = Description of Artificial Sequence: Synthetic oligonucleotide
  source 1..20: mol_type = other RNA
gagctctaatccccacgcct

SEQ ID NO: 37 - RNA, 20 nt, synthetic construct
  misc_feature 1..20: note = Description of Artificial Sequence: Synthetic oligonucleotide
  source 1..20: mol_type = other RNA
agagctccatgtgcagaacg

SEQ ID NO: 38 - RNA, 20 nt, synthetic construct
  misc_feature 1..20: note = Description of Artificial Sequence: Synthetic oligonucleotide
  source 1..20: mol_type = other RNA
gataaacttctgcactggag

SEQ ID NO: 39 - RNA, 20 nt, synthetic construct
  misc_feature 1..20: note = Description of Artificial Sequence: Synthetic oligonucleotide
  source 1..20: mol_type = other RNA
tagctgtagtgcttgatttt

SEQ ID NO: 40 - RNA, 20 nt, synthetic construct
  misc_feature 1..20: note = Description of Artificial Sequence: Synthetic oligonucleotide
  source 1..20: mol_type = other RNA
tatccaaattcatacaatag

SEQ ID NO: 41 - RNA, 20 nt, synthetic construct
  misc_feature 1..20: note = Description of Artificial Sequence: Synthetic oligonucleotide
  source 1..20: mol_type = other RNA
atgccctgagtatcccaaca

SEQ ID NO: 42 - RNA, 20 nt, synthetic construct
  misc_feature 1..20: note = Description of Artificial Sequence: Synthetic oligonucleotide
  source 1..20: mol_type = other RNA
tagtaacagacccatgtgct

SEQ ID NO: 43 - RNA, 20 nt, synthetic construct
  misc_feature 1..20: note = Description of Artificial Sequence: Synthetic oligonucleotide
  source 1..20: mol_type = other RNA
atacttcaaggcctcaatga

SEQ ID NO: 44 - RNA, 20 nt, synthetic construct
  misc_feature 1..20: note = Description of Artificial Sequence: Synthetic oligonucleotide
  source 1..20: mol_type = other RNA
gactaggtagaccttcattg

SEQ ID NO: 45 - RNA, 20 nt, synthetic construct
  misc_feature 1..20: note = Description of Artificial Sequence: Synthetic oligonucleotide
  source 1..20: mol_type = other RNA
ctgagctagtgggggctctt

SEQ ID NO: 46 - RNA, 20 nt, synthetic construct
  misc_feature 1..20: note = Description of Artificial Sequence: Synthetic oligonucleotide
  source 1..20: mol_type = other RNA
ctgagcacattcttacgcct

SEQ ID NO: 47 - RNA, 20 nt, synthetic construct
  misc_feature 1..20: note = Description of Artificial Sequence: Synthetic oligonucleotide
  source 1..20: mol_type = other RNA
  modified_base 20: mod_base = OTHER; note = Thymine
tttataagacattagggtat

SEQ ID NO: 48 - RNA, 20 nt, synthetic construct
  misc_feature 1..20: note = Description of Artificial Sequence: Synthetic oligonucleotide
  source 1..20: mol_type = other RNA
tgataggtgcctatatgtga

SEQ ID NO: 49 - RNA, 20 nt, synthetic construct
  misc_feature 1..20: note = Description of Artificial Sequence: Synthetic oligonucleotide
  source 1..20: mol_type = other RNA
tccacccatccatcacatat

SEQ ID NO: 50 - RNA, 20 nt, synthetic construct
  misc_feature 1..20: note = Description of Artificial Sequence: Synthetic oligonucleotide
  source 1..20: mol_type = other RNA
cttcaaagttgtattgaccc

SEQ ID NO: 51 - RNA, 20 nt, synthetic construct
  misc_feature 1..20: note = Description of Artificial Sequence: Synthetic oligonucleotide
  source 1..20: mol_type = other RNA
aaaccagactagtttatagg

SEQ ID NO: 52 - RNA, 20 nt, synthetic construct
  misc_feature 1..20: note = Description of Artificial Sequence: Synthetic oligonucleotide
  source 1..20: mol_type = other RNA
tttgagacagttaccccttc

SEQ ID NO: 53 - RNA, 20 nt, synthetic construct
  misc_feature 1..20: note = Description of Artificial Sequence: Synthetic oligonucleotide
  source 1..20: mol_type = other RNA
aacctgagggctagtttcta

SEQ ID NO: 54 - RNA, 20 nt, synthetic construct
  misc_feature 1..20: note = Description of Artificial Sequence: Synthetic oligonucleotide
  source 1..20: mol_type = other RNA
gcctggacccaccgcttcat

SEQ ID NO: 55 - RNA, 20 nt, synthetic construct
  misc_feature 1..20: note = Description of Artificial Sequence: Synthetic oligonucleotide
  source 1..20: mol_type = other RNA
aaaccagtgaggtcatctat

SEQ ID NO: 56 - RNA, 20 nt, synthetic construct
  misc_feature 1..20: note = Description of Artificial Sequence: Synthetic oligonucleotide
  source 1..20: mol_type = other RNA
acctgctatgtgttcctgtt

SEQ ID NO: 57 - RNA, 20 nt, synthetic construct
  misc_feature 1..20: note = Description of Artificial Sequence: Synthetic oligonucleotide
  source 1..20: mol_type = other RNA
tagaggaatttgccccaaac

SEQ ID NO: 58 - RNA, 20 nt, synthetic construct
  misc_feature 1..20: note = Description of Artificial Sequence: Synthetic oligonucleotide
  source 1..20: mol_type = other RNA
gataaacaatcgtcatcctc

SEQ ID NO: 59 - RNA, 20 nt, synthetic construct
  misc_feature 1..20: note = Description of Artificial Sequence: Synthetic oligonucleotide
  source 1..20: mol_type = other RNA
tggcatccaggtcacgccag

SEQ ID NO: 60 - RNA, 20 nt, synthetic construct
  misc_feature 1..20: note = Description of Artificial Sequence: Synthetic oligonucleotide
  source 1..20: mol_type = other RNA
gacctggatgccaacctcca

SEQ ID NO: 61 - RNA, 20 nt, synthetic construct
  misc_feature 1..20: note = Description of Artificial Sequence: Synthetic oligonucleotide
  source 1..20: mol_type = other RNA
aaaagcatccaatcccgtgg

SEQ ID NO: 62 - RNA, 20 nt, synthetic construct
  misc_feature 1..20: note = Description of Artificial Sequence: Synthetic oligonucleotide
  source 1..20: mol_type = other RNA
gatgcttttttcatctcgat

SEQ ID NO: 63 - RNA, 20 nt, synthetic construct
  misc_feature 1..20: note = Description of Artificial Sequence: Synthetic oligonucleotide
  source 1..20: mol_type = other RNA
ccacagctttttctaagcag

SEQ ID NO: 64 - RNA, 20 nt, synthetic construct
  misc_feature 1..20: note = Description of Artificial Sequence: Synthetic oligonucleotide
  source 1..20: mol_type = other RNA
cccccaatgggaagttcatc

SEQ ID NO: 65 - RNA, 20 nt, synthetic construct
  misc_feature 1..20: note = Description of Artificial Sequence: Synthetic oligonucleotide
  source 1..20: mol_type = other RNA
atcatgacctcctcacctgt

SEQ ID NO: 66 - RNA, 20 nt, synthetic construct
  misc_feature 1..20: note = Description of Artificial Sequence: Synthetic oligonucleotide
  source 1..20: mol_type = other RNA
aggaggtcatgatccccttc

SEQ ID NO: 67 - RNA, 20 nt, synthetic construct
  misc_feature 1..20: note = Description of Artificial Sequence: Synthetic oligonucleotide
  source 1..20: mol_type = other RNA
ccccttctggagctcccaac

SEQ ID NO: 68 - RNA, 20 nt, synthetic construct
  misc_feature 1..20: note = Description of Artificial Sequence: Synthetic oligonucleotide
  source 1..20: mol_type = other RNA
gctcccaacgggccgtggtc

SEQ ID NO: 69 - RNA, 20 nt, synthetic construct
  misc_feature 1..20: note = Description of Artificial Sequence: Synthetic oligonucleotide
  source 1..20: mol_type = other RNA
acagatgatgaaccagacca

SEQ ID NO: 70 - RNA, 20 nt, synthetic construct
  misc_feature 1..20: note = Description of Artificial Sequence: Synthetic oligonucleotide
  source 1..20: mol_type = other RNA
tctgtaagaatggcttcaag

SEQ ID NO: 71 - RNA, 20 nt, synthetic construct
  misc_feature 1..20: note = Description of Artificial Sequence: Synthetic oligonucleotide
  source 1..20: mol_type = other RNA
caattattagagtgccagag

SEQ ID NO: 72 - RNA, 20 nt, synthetic construct
  misc_feature 1..20: note = Description of Artificial Sequence: Synthetic oligonucleotide
  source 1..20: mol_type = other RNA
gccttgcttgcggcgagaca

SEQ ID NO: 73 - RNA, 20 nt, synthetic construct
  misc_feature 1..20: note = Description of Artificial Sequence: Synthetic oligonucleotide
  source 1..20: mol_type = other RNA
accatgtctcgccgcaagca

SEQ ID NO: 74 - RNA, 20 nt, synthetic construct
  misc_feature 1..20: note = Description of Artificial Sequence: Synthetic oligonucleotide
  source 1..20: mol_type = other RNA
gagtctccttctttctaacc

SEQ ID NO: 75 - RNA, 20 nt, synthetic construct
  misc_feature 1..20: note = Description of Artificial Sequence: Synthetic oligonucleotide
  source 1..20: mol_type = other RNA
gaattgtgggagagccgtca

SEQ ID NO: 76 - RNA, 20 nt, synthetic construct
  misc_feature 1..20: note = Description of Artificial Sequence: Synthetic oligonucleotide
  source 1..20: mol_type = other RNA
aaaatagagcgagagtgcac

SEQ ID NO: 77 - RNA, 20 nt, synthetic construct
  misc_feature 1..20: note = Description of Artificial Sequence: Synthetic oligonucleotide
  source 1..20: mol_type = other RNA
gcccctggcgtccacacgcg

SEQ ID NO: 78 - RNA, 20 nt, synthetic construct
  misc_feature 1..20: note = Description of Artificial Sequence: Synthetic oligonucleotide
  source 1..20: mol_type = other RNA
ctcctcgttctttattcctc

SEQ ID NO: 79 - RNA, 20 nt, synthetic construct
  misc_feature 1..20: note = Description of Artificial Sequence: Synthetic oligonucleotide
  source 1..20: mol_type = other RNA
gactgcccgcgctttgtcct

SEQ ID NO: 80 - RNA, 20 nt, synthetic construct
  misc_feature 1..20: note = Description of Artificial Sequence: Synthetic oligonucleotide
  source 1..20: mol_type = other RNA
ttcccagggactgggactcc

SEQ ID NO: 81 - RNA, 20 nt, synthetic construct
  misc_feature 1..20: note = Description of Artificial Sequence: Synthetic oligonucleotide
  source 1..20: mol_type = other RNA
tggctcctgggtgtgcgcct

SEQ ID NO: 82 - RNA, 20 nt, synthetic construct
  misc_feature 1..20: note = Description of Artificial Sequence: Synthetic oligonucleotide
  source 1..20: mol_type = other RNA
tgaagcccgctttttgacag

SEQ ID NO: 83 - RNA, 20 nt, synthetic construct
  misc_feature 1..20: note = Description of Artificial Sequence: Synthetic oligonucleotide
  source 1..20: mol_type = other RNA
agggtggagacgggtcgcca

SEQ ID NO: 84 - RNA, 20 nt, synthetic construct
  misc_feature 1..20: note = Description of Artificial Sequence: Synthetic oligonucleotide
  source 1..20: mol_type = other RNA
gctcagggtctcgcgggcca

SEQ ID NO: 85 - RNA, 20 nt, synthetic construct
  misc_feature 1..20: note = Description of Artificial Sequence: Synthetic oligonucleotide
  source 1..20: mol_type = other RNA
tgagtccgagcagaagaaga

SEQ ID NO: 86 - RNA, 20 nt, synthetic construct
  misc_feature 1..20: note = Description of Artificial Sequence: Synthetic oligonucleotide
  source 1..20: mol_type = other RNA
tcttaaaccaacctgctcac

SEQ ID NO: 87 - RNA, 20 nt, synthetic construct
  misc_feature 1..20: note = Description of Artificial Sequence: Synthetic oligonucleotide
  source 1..20: mol_type = other RNA
caggttggtttaagataagc

SEQ ID NO: 88 - RNA, 20 nt, synthetic construct
  misc_feature 1..20: note = Description of Artificial Sequence: Synthetic oligonucleotide
  source 1..20: mol_type = other RNA
aggttggtttaagataagca

SEQ ID NO: 89 - RNA, 20 nt, synthetic construct
  misc_feature 1..20: note = Description of Artificial Sequence: Synthetic oligonucleotide
  source 1..20: mol_type = other RNA
ttaagggaatagtggaatga

SEQ ID NO: 90 - RNA, 20 nt, synthetic construct
  misc_feature 1..20: note = Description of Artificial Sequence: Synthetic oligonucleotide
  source 1..20: mol_type = other RNA
agggcaagttaagggaatag

SEQ ID NO: 91 - RNA, 20 nt, synthetic construct
  misc_feature 1..20: note = Description of Artificial Sequence: Synthetic oligonucleotide
  source 1..20: mol_type = other RNA
cccttaacttgccctgagat

SEQ ID NO: 92 - RNA, 20 nt, synthetic construct
  misc_feature 1..20: note = Description of Artificial Sequence: Synthetic oligonucleotide
  source 1..20: mol_type = other RNA
ccaatctcagggcaagttaa

SEQ ID NO: 93 - RNA, 20 nt, synthetic construct
  misc_feature 1..20: note = Description of Artificial Sequence: Synthetic oligonucleotide
  source 1..20: mol_type = other RNA
gccaatctcagggcaagtta

SEQ ID NO: 94 - RNA, 20 nt, synthetic construct
  misc_feature 1..20: note = Description of Artificial Sequence: Synthetic oligonucleotide
  source 1..20: mol_type = other RNA
tgacagaacagccaatctca

SEQ ID NO: 95 - RNA, 20 nt, synthetic construct
  misc_feature 1..20: note = Description of Artificial Sequence: Synthetic oligonucleotide
  source 1..20: mol_type = other RNA
atgacagaacagccaatctc

SEQ ID NO: 96 - RNA, 20 nt, synthetic construct
  misc_feature 1..20: note = Description of Artificial Sequence: Synthetic oligonucleotide
  source 1..20: mol_type = other RNA
gagatatgtagaggagaaca

SEQ ID NO: 97 - RNA, 20 nt, synthetic construct
  misc_feature 1..20: note = Description of Artificial Sequence: Synthetic oligonucleotide
  source 1..20: mol_type = other RNA
ggagatatgtagaggagaac

SEQ ID NO: 98 - RNA, 20 nt, synthetic construct
  misc_feature 1..20: note = Description of Artificial Sequence: Synthetic oligonucleotide
  source 1..20: mol_type = other RNA
tgcggtggggagatatgtag

SEQ ID NO: 99 - RNA, 20 nt, synthetic construct
  misc_feature 1..20: note = Description of Artificial Sequence: Synthetic oligonucleotide
  source 1..20: mol_type = other RNA
ctgctgaaagagatgcggtg

SEQ ID NO: 100 - RNA, 20 nt, synthetic construct
  misc_feature 1..20: note = Description of Artificial Sequence: Synthetic oligonucleotide
  source 1..20: mol_type = other RNA
actgctgaaagagatgcggt

SEQ ID NO: 101 - RNA, 20 nt, synthetic construct
  misc_feature 1..20: note = Description of Artificial Sequence: Synthetic oligonucleotide
  source 1..20: mol_type = other RNA
aactgctgaaagagatgcgg

SEQ ID NO: 102 - RNA, 20 nt, synthetic construct
  misc_feature 1..20: note = Description of Artificial Sequence: Synthetic oligonucleotide
  source 1..20: mol_type = other RNA
aacaactgctgaaagagatg

SEQ ID NO: 103 - RNA, 20 nt, synthetic construct
  misc_feature 1..20: note = Description of Artificial Sequence: Synthetic oligonucleotide
  source 1..20: mol_type = other RNA
tctgcaaaaatgaaactagg

SEQ ID NO: 104 - RNA, 20 nt, synthetic construct
  misc_feature 1..20: note = Description of Artificial Sequence: Synthetic oligonucleotide
  source 1..20: mol_type = other RNA
acttctgcaaaaatgaaact

SEQ ID NO: 105 - RNA, 20 nt, synthetic construct
  misc_feature 1..20: note = Description of Artificial Sequence: Synthetic oligonucleotide
  source 1..20: mol_type = other RNA
catttttgcagaagtgtttt

SEQ ID NO: 106 - RNA, 20 nt, synthetic construct
  misc_feature 1..20: note = Description of Artificial Sequence: Synthetic oligonucleotide
  source 1..20: mol_type = other RNA
agtgttttaggctaatatag

SEQ ID NO: 107 - RNA, 20 nt, synthetic construct
  misc_feature 1..20: note = Description of Artificial Sequence: Synthetic oligonucleotide
  source 1..20: mol_type = other RNA
ttggagacaaaaatctctag

SEQ ID NO: 108 - RNA, 20 nt, synthetic construct
  misc_feature 1..20: note = Description of Artificial Sequence: Synthetic oligonucleotide
  source 1..20: mol_type = other RNA
tctagagatttttgtctcca

SEQ ID NO: 109 - RNA, 20 nt, synthetic construct
  misc_feature 1..20: note = Description of Artificial Sequence: Synthetic oligonucleotide
  source 1..20: mol_type = other RNA
ctagagatttttgtctccaa

SEQ ID NO: 110 - RNA, 20 nt, synthetic construct
  misc_feature 1..20: note = Description of Artificial Sequence: Synthetic oligonucleotide
  source 1..20: mol_type = other RNA
gtctccaagggaattttgag

SEQ ID NO: 111 - RNA, 20 nt, synthetic construct
  misc_feature 1..20: note = Description of Artificial Sequence: Synthetic oligonucleotide
  source 1..20: mol_type = other RNA
ccaagggaattttgagaggt

SEQ ID NO: 112 - RNA, 20 nt, synthetic construct
  misc_feature 1..20: note = Description of Artificial Sequence: Synthetic oligonucleotide
  source 1..20: mol_type = other RNA
ccaacctctcaaaattccct

SEQ ID NO: 113 - RNA, 20 nt, synthetic construct
  misc_feature 1..20: note = Description of Artificial Sequence: Synthetic oligonucleotide
  source 1..20: mol_type = other RNA
ggaattttgagaggttggaa

SEQ ID NO: 114 - RNA, 20 nt, synthetic construct
  misc_feature 1..20: note = Description of Artificial Sequence: Synthetic oligonucleotide
  source 1..20: mol_type = other RNA
tgcttgcttcctccttcttt

SEQ ID NO: 115 - RNA, 20 nt, synthetic construct
  misc_feature 1..20: note = Description of Artificial Sequence: Synthetic oligonucleotide
  source 1..20: mol_type = other RNA
aagaatttaccaaaagaagg

SEQ ID NO: 116 - RNA, 20 nt, synthetic construct
  misc_feature 1..20: note = Description of Artificial Sequence: Synthetic oligonucleotide
  source 1..20: mol_type = other RNA
aggaagaatttaccaaaaga

SEQ ID NO: 117 - RNA, 20 nt, synthetic construct
  misc_feature 1..20: note = Description of Artificial Sequence: Synthetic oligonucleotide
  source 1..20: mol_type = other RNA
aaaaattagagttttattat

SEQ ID NO: 118 - RNA, 20 nt, synthetic construct
  misc_feature 1..20: note = Description of Artificial Sequence: Synthetic oligonucleotide
  source 1..20: mol_type = other RNA
ttttttaaatattcttttaa

SEQ ID NO: 119 - RNA, 20 nt, synthetic construct
  misc_feature 1..20: note = Description of Artificial Sequence: Synthetic oligonucleotide
  source 1..20: mol_type = other RNA
tatttaccagttattgaaat

SEQ ID NO: 120 - RNA, 20 nt, synthetic construct
  misc_feature 1..20: note = Description of Artificial Sequence: Synthetic oligonucleotide
  source 1..20: mol_type = other RNA
ccagttattgaaataggttc

SEQ ID NO: 121 - RNA, 20 nt, synthetic construct
  misc_feature 1..20: note = Description of Artificial Sequence: Synthetic oligonucleotide
  source 1..20: mol_type = other RNA
ccagaacctatttcaataac

SEQ ID NO: 122 - RNA, 20 nt, synthetic construct
  misc_feature 1..20: note = Description of Artificial Sequence: Synthetic oligonucleotide
  source 1..20: mol_type = other RNA
ttctggaaacatgaatttta

SEQ ID NO: 123 - RNA, 20 nt, synthetic construct
  misc_feature 1..20: note = Description of Artificial Sequence: Synthetic oligonucleotide
  source 1..20: mol_type = other RNA
attttgaatgtttaaaatta

SEQ ID NO: 124 - RNA, 20 nt, synthetic construct
  misc_feature 1..20: note = Description of Artificial Sequence: Synthetic oligonucleotide
  source 1..20: mol_type = other RNA
aaatttaatctggctgaata

SEQ ID NO: 125 - RNA, 20 nt, synthetic construct
  misc_feature 1..20: note = Description of Artificial Sequence: Synthetic oligonucleotide
  source 1..20: mol_type = other RNA
gaacttcgttaaatttaatc

SEQ ID NO: 126 - RNA, 20 nt, synthetic construct
  misc_feature 1..20: note = Description of Artificial Sequence: Synthetic oligonucleotide
  source 1..20: mol_type = other RNA
attaaatttaacgaagttcc

SEQ ID NO: 127 - RNA, 20 nt, synthetic construct
  misc_feature 1..20: note = Description of Artificial Sequence: Synthetic oligonucleotide
  source 1..20: mol_type = other RNA
ttaaatttaacgaagttcct

SEQ ID NO: 128 - RNA, 20 nt, synthetic construct
  misc_feature 1..20: note = Description of Artificial Sequence: Synthetic oligonucleotide
  source 1..20: mol_type = other RNA
ttctgtactagcatattccc

SEQ ID NO: 129 - RNA, 20 nt, synthetic construct
  misc_feature 1..20: note = Description of Artificial Sequence: Synthetic oligonucleotide
  source 1..20: mol_type = other RNA
tgtgttcttaaaaaaaaatg

SEQ ID NO: 130 - RNA, 20 nt, synthetic construct
  misc_feature 1..20: note = Description of Artificial Sequence: Synthetic oligonucleotide
  source 1..20: mol_type = other RNA
aaaaatgtggaattagaccc

SEQ ID NO: 131 - RNA, 20 nt, synthetic construct
  misc_feature 1..20: note = Description of Artificial Sequence: Synthetic oligonucleotide
  source 1..20: mol_type = other RNA
ctactgggatcttcattcct

SEQ ID NO: 132 - RNA, 20 nt, synthetic construct
  misc_feature 1..20: note = Description of Artificial Sequence: Synthetic oligonucleotide
  source 1..20: mol_type = other RNA
actactgggatcttcattcc

SEQ ID NO: 133 - RNA, 20 nt, synthetic construct
  misc_feature 1..20: note = Description of Artificial Sequence: Synthetic oligonucleotide
  source 1..20: mol_type = other RNA
gaaaagagtgaaaaactact

SEQ ID NO: 134 - RNA, 20 nt, synthetic construct
  misc_feature 1..20: note = Description of Artificial Sequence: Synthetic oligonucleotide
  source 1..20: mol_type = other RNA
agaaaagagtgaaaaactac

SEQ ID NO: 135 - RNA, 20 nt, synthetic construct
  misc_feature 1..20: note = Description of Artificial Sequence: Synthetic oligonucleotide
  source 1..20: mol_type = other RNA
gaattcaaataatgccacaa

SEQ ID NO: 136 - RNA, 20 nt, synthetic construct
  misc_feature 1..20: note = Description of Artificial Sequence: Synthetic oligonucleotide
  source 1..20: mol_type = other RNA
tgtgtatttgtctgccattg

SEQ ID NO: 137 - RNA, 20 nt, synthetic construct
  misc_feature 1..20: note = Description of Artificial Sequence: Synthetic oligonucleotide
  source 1..20: mol_type = other RNA
cacccatgagcatatccaaa

SEQ ID NO: 138 - RNA, 20 nt, synthetic construct
  misc_feature 1..20: note = Description of Artificial Sequence: Synthetic oligonucleotide
  source 1..20: mol_type = other RNA
ttccttttggatatgctcat

SEQ ID NO: 139 - RNA, 20 nt, synthetic construct
  misc_feature 1..20: note = Description of Artificial Sequence: Synthetic oligonucleotide
  source 1..20: mol_type = other RNA
cttccttttggatatgctca

SEQ ID NO: 140 - RNA, 20 nt, synthetic construct
  misc_feature 1..20: note = Description of Artificial Sequence: Synthetic oligonucleotide
  source 1..20: mol_type = other RNA
catgagcatatccaaaagga

SEQ ID NO: 141 - RNA, 20 nt, synthetic construct
  misc_feature 1..20: note = Description of Artificial Sequence: Synthetic oligonucleotide
  source 1..20: mol_type = other RNA
tatccaaaaggaaggattga

SEQ ID NO: 142 - RNA, 20 nt, synthetic construct
  misc_feature 1..20: note = Description of Artificial Sequence: Synthetic oligonucleotide
  source 1..20: mol_type = other RNA
tttccttcaatccttccttt

SEQ ID NO: 143 - RNA, 20 nt, synthetic construct
  misc_feature 1..20: note = Description of Artificial Sequence: Synthetic oligonucleotide
  source 1..20: mol_type = other RNA
aaggaaggattgaaggaaag

SEQ ID NO: 144 - RNA, 20 nt, synthetic construct
  misc_feature 1..20: note = Description of Artificial Sequence: Synthetic oligonucleotide
  source 1..20: mol_type = other RNA
gaaggattgaaggaaagagg

SEQ ID NO: 145 - RNA, 20 nt, synthetic construct
  misc_feature 1..20: note = Description of Artificial Sequence: Synthetic oligonucleotide
  source 1..20: mol_type = other RNA
gaggaggaagaaatggagaa

SEQ ID NO: 146 - RNA, 20 nt, synthetic construct
  misc_feature 1..20: note = Description of Artificial Sequence: Synthetic oligonucleotide
  source 1..20: mol_type = other RNA
aggaagaaatggagaaagga

SEQ ID NO: 147 - RNA, 20 nt, synthetic construct
  misc_feature 1..20: note = Description of Artificial Sequence: Synthetic oligonucleotide
  source 1..20: mol_type = other RNA
gaaggaagaggggaagagag

SEQ ID NO: 148 - RNA, 20 nt, synthetic construct
  misc_feature 1..20: note = Description of Artificial Sequence: Synthetic oligonucleotide
  source 1..20: mol_type = other RNA
gaagaggggaagagagagga

SEQ ID NO: 149 - RNA, 20 nt, synthetic construct
  misc_feature 1..20: note = Description of Artificial Sequence: Synthetic oligonucleotide
  source 1..20: mol_type = other RNA
aggggaagagagaggatgga

SEQ ID NO: 150 - RNA, 20 nt, synthetic construct
  misc_feature 1..20: note = Description of Artificial Sequence: Synthetic oligonucleotide
  source 1..20: mol_type = other RNA
ggggaagagagaggatggaa

SEQ ID NO: 151 - RNA, 20 nt, synthetic construct
  misc_feature 1..20: note = Description of Artificial Sequence: Synthetic oligonucleotide
  source 1..20: mol_type = other RNA
aagagagaggatggaaggga

SEQ ID NO: 152 - RNA, 20 nt, synthetic construct
  misc_feature 1..20: note = Description of Artificial Sequence: Synthetic oligonucleotide
  source 1..20: mol_type = other RNA
agagaggatggaagggatgg

SEQ ID NO: 153 - RNA, 20 nt, synthetic construct
  misc_feature 1..20: note = Description of Artificial Sequence: Synthetic oligonucleotide
  source 1..20: mol_type = other RNA
ggaagggatggaggagaaga

SEQ ID NO: 154 - RNA, 20 nt, synthetic construct
  misc_feature 1..20: note = Description of Artificial Sequence: Synthetic oligonucleotide
  source 1..20: mol_type = other RNA
gaagaaggaaaaataaataa

SEQ ID NO: 155 - RNA, 20 nt, synthetic construct
  misc_feature 1..20: note = Description of Artificial Sequence: Synthetic oligonucleotide
  source 1..20: mol_type = other RNA
aggaaaaataaataatggag

SEQ ID NO: 156 - RNA, 20 nt, synthetic construct
  misc_feature 1..20: note = Description of Artificial Sequence: Synthetic oligonucleotide
  source 1..20: mol_type = other RNA
aaataaataatggagaggag

SEQ ID NO: 157 - RNA, 20 nt, synthetic construct
  misc_feature 1..20: note = Description of Artificial Sequence: Synthetic oligonucleotide
  source 1..20: mol_type = other RNA
tggagaggagaggagaaaaa

SEQ ID NO: 158 - RNA, 20 nt, synthetic construct
  misc_feature 1..20: note = Description of Artificial Sequence: Synthetic oligonucleotide
  source 1..20: mol_type = other RNA
agaggagaggagaaaaaagg

SEQ ID NO: 159 - RNA, 20 nt, synthetic construct
  misc_feature 1..20: note = Description of Artificial Sequence: Synthetic oligonucleotide
  source 1..20: mol_type = other RNA
gaggagaggagaaaaaagga

SEQ ID NO: 160 - RNA, 20 nt, synthetic construct
  misc_feature 1..20: note = Description of Artificial Sequence: Synthetic oligonucleotide
  source 1..20: mol_type = other RNA
aggagaggagaaaaaaggag

SEQ ID NO: 161 - RNA, 20 nt, synthetic construct
  misc_feature 1..20: note = Description of Artificial Sequence: Synthetic oligonucleotide
  source 1..20: mol_type = other RNA
aggagaaaaaaggaggggag

SEQ ID NO: 162 - RNA, 20 nt, synthetic construct
  misc_feature 1..20: note = Description of Artificial Sequence: Synthetic oligonucleotide
  source 1..20: mol_type = other RNA
gagaggagaggagaagggat

SEQ ID NO: 163 - RNA, 20 nt, synthetic construct
  misc_feature 1..20: note = Description of Artificial Sequence: Synthetic oligonucleotide
  source 1..20: mol_type = other RNA
agaggagaggagaagggata

SEQ ID NO: 164 - RNA, 20 nt, synthetic construct
  misc_feature 1..20: note = Description of Artificial Sequence: Synthetic oligonucleotide
  source 1..20: mol_type = other RNA
gaagagaaagagaaagggaa

SEQ ID NO: 165 - RNA, 20 nt, synthetic construct
  misc_feature 1..20: note = Description of Artificial Sequence: Synthetic oligonucleotide
  source 1..20: mol_type = other RNA
aagagaggaaagaagagaag

SEQ ID NO: 166 - RNA, 20 nt, synthetic construct
  misc_feature 1..20: note = Description of Artificial Sequence: Synthetic oligonucleotide
  source 1..20: mol_type = other RNA
gagagaaaagaaacgaagag

SEQ ID NO: 167 - RNA, 20 nt, synthetic construct
  misc_feature 1..20: note = Description of Artificial Sequence: Synthetic oligonucleotide
  source 1..20: mol_type = other RNA
agagaaaagaaacgaagaga

SEQ ID NO: 168 - RNA, 20 nt, synthetic construct
  misc_feature 1..20: note = Description of Artificial Sequence: Synthetic oligonucleotide
  source 1..20: mol_type = other RNA
gagaaaagaaacgaagagag

SEQ ID NO: 169 - RNA, 20 nt, synthetic construct
  misc_feature 1..20: note = Description of Artificial Sequence: Synthetic oligonucleotide
  source 1..20: mol_type = other RNA
aaagaaacgaagagagggga

SEQ ID NO: 170 - RNA, 20 nt, synthetic construct
  misc_feature 1..20: note = Description of Artificial Sequence: Synthetic oligonucleotide
  source 1..20: mol_type = other RNA
aagaaacgaagagaggggaa

SEQ ID NO: 171 - RNA, 20 nt, synthetic construct
  misc_feature 1..20: note = Description of Artificial Sequence: Synthetic oligonucleotide
  source 1..20: mol_type = other RNA
ggaagggaaggaaaaaaaag

SEQ ID NO: 172 - RNA, 20 nt, synthetic construct
  misc_feature 1..20: note = Description of Artificial Sequence: Synthetic oligonucleotide
  source 1..20: mol_type = other RNA
aagactgacagttcaaattt

SEQ ID NO: 173 - RNA, 20 nt, synthetic construct
  misc_feature 1..20: note = Description of Artificial Sequence: Synthetic oligonucleotide
  source 1..20: mol_type = other RNA
actgacagttcaaattttgg

SEQ ID NO: 174 - RNA, 20 nt, synthetic construct
  misc_feature 1..20: note = Description of Artificial Sequence: Synthetic oligonucleotide
  source 1..20: mol_type = other RNA
ttcaaattttggtggtgata

SEQ ID NO: 175 - RNA, 20 nt, synthetic construct
  misc_feature 1..20: note = Description of Artificial Sequence: Synthetic oligonucleotide
  source 1..20: mol_type = other RNA
aatagaaactcaaactctgt

SEQ ID NO: 176 - RNA, 20 nt, synthetic construct
  misc_feature 1..20: note = Description of Artificial Sequence: Synthetic oligonucleotide
  source 1..20: mol_type = other RNA
gtacaatagtataacccctt

SEQ ID NO: 177 - RNA, 20 nt, synthetic construct
  misc_feature 1..20: note = Description of Artificial Sequence: Synthetic oligonucleotide
  source 1..20: mol_type = other RNA
ctattaaaggttttccaaag

SEQ ID NO: 178 - RNA, 20 nt, synthetic construct
  misc_feature 1..20: note = Description of Artificial Sequence: Synthetic oligonucleotide
  source 1..20: mol_type = other RNA
actattaaaggttttccaaa

SEQ ID NO: 179 - RNA, 20 nt, synthetic construct
  misc_feature 1..20: note = Description of Artificial Sequence: Synthetic oligonucleotide
  source 1..20: mol_type = other RNA
tactattaaaggttttccaa

SEQ ID NO: 180 - RNA, 20 nt, synthetic construct
  misc_feature 1..20: note = Description of Artificial Sequence: Synthetic oligonucleotide
  source 1..20: mol_type = other RNA
gcatttgtggatactattaa

SEQ ID NO: 181 - RNA, 20 nt, synthetic construct
  misc_feature 1..20: note = Description of Artificial Sequence: Synthetic oligonucleotide
  source 1..20: mol_type = other RNA
ttaatagtatccacaaatgc

SEQ ID NO: 182 - RNA, 20 nt, synthetic construct
  misc_feature 1..20: note = Description of Artificial Sequence: Synthetic oligonucleotide
  source 1..20: mol_type = other RNA
tatgcaatttttgccaagat

SEQ ID NO: 183 - RNA, 20 nt, synthetic construct
  misc_feature 1..20: note = Description of Artificial Sequence: Synthetic oligonucleotide
  source 1..20: mol_type = other RNA
ttttgccaagatgggagtat

SEQ ID NO: 184 - RNA, 20 nt, synthetic construct
  misc_feature 1..20: note = Description of Artificial Sequence: Synthetic oligonucleotide
  source 1..20: mol_type = other RNA
tttgccaagatgggagtatg

SEQ ID NO: 185 - RNA, 20 nt, synthetic construct
  misc_feature 1..20: note = Description of Artificial Sequence: Synthetic oligonucleotide
  source 1..20: mol_type = other RNA
tcagtgagatgagatatcaa

SEQ ID NO: 186 - RNA, 20 nt, synthetic construct
  misc_feature 1..20: note = Description of Artificial Sequence: Synthetic oligonucleotide
  source 1..20: mol_type = other RNA
cagtgagatgagatatcaaa

SEQ ID NO: 187 - RNA, 20 nt, synthetic construct
  misc_feature 1..20: note = Description of Artificial Sequence: Synthetic oligonucleotide
  source 1..20: mol_type = other RNA
ccatctccctaatctccaat

SEQ ID NO: 188 - RNA, 20 nt, synthetic construct
  misc_feature 1..20: note = Description of Artificial Sequence: Synthetic oligonucleotide
  source 1..20: mol_type = other RNA
ccaattggagattagggaga

SEQ ID NO: 189 - RNA, 20 nt, synthetic construct
  misc_feature 1..20: note = Description of Artificial Sequence: Synthetic oligonucleotide
  source 1..20: mol_type = other RNA
gctttgccaattggagatta

SEQ ID NO: 190 - RNA, 20 nt, synthetic construct
  misc_feature 1..20: note = Description of Artificial Sequence: Synthetic oligonucleotide
  source 1..20: mol_type = other RNA
ggctttgccaattggagatt

SEQ ID NO: 191 - RNA, 20 nt, synthetic construct
  misc_feature 1..20: note = Description of Artificial Sequence: Synthetic oligonucleotide
  source 1..20: mol_type = other RNA
aattggcaaagccagacttg

SEQ ID NO: 192 - RNA, 20 nt, synthetic construct
  misc_feature 1..20: note = Description of Artificial Sequence: Synthetic oligonucleotide
  source 1..20: mol_type = other RNA
agtctgtattgccccaagtc

SEQ ID NO: 193 - RNA, 20 nt, synthetic construct
  misc_feature 1..20: note = Description of Artificial Sequence: Synthetic oligonucleotide
  source 1..20: mol_type = other RNA
agacttggggcaatacagac

SEQ ID NO: 194 - RNA, 20 nt, synthetic construct
  misc_feature 1..20: note = Description of Artificial Sequence: Synthetic oligonucleotide
  source 1..20: mol_type = other RNA
acatttggtgataaatcatt

SEQ ID NO: 195 - RNA, 20 nt, synthetic construct
  misc_feature 1..20: note = Description of Artificial Sequence: Synthetic oligonucleotide
  source 1..20: mol_type = other RNA
ccaaatgttctttcttcagc

SEQ ID NO: 196 - RNA, 20 nt, synthetic construct
  misc_feature 1..20: note = Description of Artificial Sequence: Synthetic oligonucleotide
  source 1..20: mol_type = other RNA
ataatagtatatgcttcata

SEQ ID NO: 197 - RNA, 20 nt, synthetic construct
  misc_feature 1..20: note = Description of Artificial Sequence: Synthetic oligonucleotide
  source 1..20: mol_type = other RNA
cggagcacttactctgctct

SEQ ID NO: 198 - RNA, 20 nt, synthetic construct
  misc_feature 1..20: note = Description of Artificial Sequence: Synthetic oligonucleotide
  source 1..20: mol_type = other RNA
agcattttagttcacaagct

SEQ ID NO: 199 - RNA, 20 nt, synthetic construct
  misc_feature 1..20: note = Description of Artificial Sequence: Synthetic oligonucleotide
  source 1..20: mol_type = other RNA
tgtaactaataaataccagg

SEQ ID NO: 200 - RNA, 20 nt, synthetic construct
  misc_feature 1..20: note = Description of Artificial Sequence: Synthetic oligonucleotide
  source 1..20: mol_type = other RNA
aggtgtaactaataaatacc

SEQ ID NO: 201 - RNA, 20 nt, synthetic construct
  misc_feature 1..20: note = Description of Artificial Sequence: Synthetic oligonucleotide
  source 1..20: mol_type = other RNA
tctgacccaaactaggaatt

SEQ ID NO: 202 - RNA, 20 nt, synthetic construct
  misc_feature 1..20: note = Description of Artificial Sequence: Synthetic oligonucleotide
  source 1..20: mol_type = other RNA
aaggaaaagaatatgacgtc

SEQ ID NO: 203 - RNA, 20 nt, synthetic construct
  misc_feature 1..20: note = Description of Artificial Sequence: Synthetic oligonucleotide
  source 1..20: mol_type = other RNA
aggaaaagaatatgacgtca

SEQ ID NO: 204 - RNA, 20 nt, synthetic construct
  misc_feature 1..20: note = Description of Artificial Sequence: Synthetic oligonucleotide
  source 1..20: mol_type = other RNA
ggaaaagaatatgacgtcag

SEQ ID NO: 205 - RNA, 20 nt, synthetic construct
  misc_feature 1..20: note = Description of Artificial Sequence: Synthetic oligonucleotide
  source 1..20: mol_type = other RNA
gaaaagaatatgacgtcagg

SEQ ID NO: 206 - RNA, 20 nt, synthetic construct
  misc_feature 1..20: note = Description of Artificial Sequence: Synthetic oligonucleotide
  source 1..20: mol_type = other RNA
tcagggggaggcaagtcagt

SEQ ID NO: 207 - RNA, 20 nt, synthetic construct
  misc_feature 1..20: note = Description of Artificial Sequence: Synthetic oligonucleotide
  source 1..20: mol_type = other RNA
cagggggaggcaagtcagtt

SEQ ID NO: 208 - RNA, 20 nt, synthetic construct
  misc_feature 1..20: note = Description of Artificial Sequence: Synthetic oligonucleotide
  source 1..20: mol_type = other RNA
atcacatataggcacctatc

SEQ ID NO: 209 - RNA, 20 nt, synthetic construct
  misc_feature 1..20: note = Description of Artificial Sequence: Synthetic oligonucleotide
  source 1..20: mol_type = other RNA
caggtaccagctactgtgtt

SEQ ID NO: 210 - RNA, 20 nt, synthetic construct
  misc_feature 1..20: note = Description of Artificial Sequence: Synthetic oligonucleotide
  source 1..20: mol_type = other RNA
actatccacggatatacact

SEQ ID NO: 211 - RNA, 20 nt, synthetic construct
  misc_feature 1..20: note = Description of Artificial Sequence: Synthetic oligonucleotide
  source 1..20: mol_type = other RNA
cacagtagctggtacctgat

SEQ ID NO: 212 - RNA, 20 nt, synthetic construct
  misc_feature 1..20: note = Description of Artificial Sequence: Synthetic oligonucleotide
  source 1..20: mol_type = other RNA
atcacatataggcacctatc

SEQ ID NO: 213 - RNA, 20 nt, synthetic construct
  misc_feature 1..20: note = Description of Artificial Sequence: Synthetic oligonucleotide
  source 1..20: mol_type = other RNA
tgataggtgcctatatgtga

SEQ ID NO: 214 - RNA, 20 nt, synthetic construct
  misc_feature 1..20: note = Description of Artificial Sequence: Synthetic oligonucleotide
  source 1..20: mol_type = other RNA
aggtgcctatatgtgatgga

SEQ ID NO: 215 - RNA, 20 nt, synthetic construct
  misc_feature 1..20: note = Description of Artificial Sequence: Synthetic oligonucleotide
  source 1..20: mol_type = other RNA
ggtgcctatatgtgatggat

SEQ ID NO: 216 - RNA, 20 nt, synthetic construct
  misc_feature 1..20: note = Description of Artificial Sequence: Synthetic oligonucleotide
  source 1..20: mol_type = other RNA
tccacccatccatcacatat

SEQ ID NO: 217 - RNA, 20 nt, synthetic construct
  misc_feature 1..20: note = Description of Artificial Sequence: Synthetic oligonucleotide
  source 1..20: mol_type = other RNA
acagcccgacagatgaaaaa

SEQ ID NO: 218 - RNA, 20 nt, synthetic construct
  misc_feature 1..20: note = Description of Artificial Sequence: Synthetic oligonucleotide
  source 1..20: mol_type = other RNA
atgaaaaatggacaattatg

SEQ ID NO: 219 - RNA, 20 nt, synthetic construct
  misc_feature 1..20: note = Description of Artificial Sequence: Synthetic oligonucleotide
  source 1..20: mol_type = other RNA
aaaaatggacaattatgagg

SEQ ID NO: 220 - RNA, 20 nt, synthetic construct
  misc_feature 1..20: note = Description of Artificial Sequence: Synthetic oligonucleotide
  source 1..20: mol_type = other RNA
aaaatggacaattatgagga

SEQ ID NO: 221 - RNA, 20 nt, synthetic construct
  misc_feature 1..20: note = Description of Artificial Sequence: Synthetic oligonucleotide
  source 1..20: mol_type = other RNA
aaatggacaattatgaggag

SEQ ID NO: 222 - RNA, 20 nt, synthetic construct
  misc_feature 1..20: note = Description of Artificial Sequence: Synthetic oligonucleotide
  source 1..20: mol_type = other RNA
gaggaggggagagtgcagac

SEQ ID NO: 223 - RNA, 20 nt, synthetic construct
  misc_feature 1..20: note = Description of Artificial Sequence: Synthetic oligonucleotide
  source 1..20: mol_type = other RNA
aggaggggagagtgcagaca

SEQ ID NO: 224 - RNA, 20 nt, synthetic construct
  misc_feature 1..20: note = Description of Artificial Sequence: Synthetic oligonucleotide
  source 1..20: mol_type = other RNA
cttcacctcctttacaattt

SEQ ID NO: 225 - RNA, 20 nt, synthetic construct
  misc_feature 1..20: note = Description of Artificial Sequence: Synthetic oligonucleotide
  source 1..20: mol_type = other RNA
ttcacctcctttacaatttt

SEQ ID NO: 226 - RNA, 20 nt, synthetic construct
  misc_feature 1..20: note = Description of Artificial Sequence: Synthetic oligonucleotide
  source 1..20: mol_type = other RNA
gactcccaaaattgtaaagg

SEQ ID NO: 227 - RNA, 20 nt, synthetic construct
  misc_feature 1..20: note = Description of Artificial Sequence: Synthetic oligonucleotide
  source 1..20: mol_type = other RNA
gtggactcccaaaattgtaa

SEQ ID NO: 228 - RNA, 20 nt, synthetic construct
  misc_feature 1..20: note = Description of Artificial Sequence: Synthetic oligonucleotide
  source 1..20: mol_type = other RNA
ttttgggagtccacacggca

SEQ ID NO: 229 - RNA, 20 nt, synthetic construct
  misc_feature 1..20: note = Description of Artificial Sequence: Synthetic oligonucleotide
  source 1..20: mol_type = other RNA
aatttgtatgccatgccgtg

SEQ ID NO: 230 - RNA, 20 nt, synthetic construct
  misc_feature 1..20: note = Description of Artificial Sequence: Synthetic oligonucleotide
  source 1..20: mol_type = other RNA
ccaagagagccttccgaaag

SEQ ID NO: 231 - RNA, 20 nt, synthetic construct
  misc_feature 1..20: note = Description of Artificial Sequence: Synthetic oligonucleotide
  source 1..20: mol_type = other RNA
ccaggggggcctctttcgga

SEQ ID NO: 232 - RNA, 20 nt, synthetic construct
  misc_feature 1..20: note = Description of Artificial Sequence: Synthetic oligonucleotide
  source 1..20: mol_type = other RNA
ccttccgaaagaggcccccc

SEQ ID NO: 233 - RNA, 20 nt, synthetic construct
  misc_feature 1..20: note = Description of Artificial Sequence: Synthetic oligonucleotide
  source 1..20: mol_type = other RNA
cttccgaaagaggcccccct

SEQ ID NO: 234 - RNA, 20 nt, synthetic construct
  misc_feature 1..20: note = Description of Artificial Sequence: Synthetic oligonucleotide
  source 1..20: mol_type = other RNA
aagaggcccccctgggcaaa

SEQ ID NO: 235 - RNA, 20 nt, synthetic construct
  misc_feature 1..20: note = Description of Artificial Sequence: Synthetic oligonucleotide
  source 1..20: mol_type = other RNA
cggtggccgtttgcccaggg

SEQ ID NO: 236 - RNA, 20 nt, synthetic construct
  misc_feature 1..20: note = Description of Artificial Sequence: Synthetic oligonucleotide
  source 1..20: mol_type = other RNA
tcggtggccgtttgcccagg

SEQ ID NO: 237 - RNA, 20 nt, synthetic construct
  misc_feature 1..20: note = Description of Artificial Sequence: Synthetic oligonucleotide
  source 1..20: mol_type = other RNA
atcggtggccgtttgcccag

SEQ ID NO: 238 - RNA, 20 nt, synthetic construct
  misc_feature 1..20: note = Description of Artificial Sequence: Synthetic oligonucleotide
  source 1..20: mol_type = other RNA
catcggtggccgtttgccca

SEQ ID NO: 239 - RNA, 20 nt, synthetic construct
  misc_feature 1..20: note = Description of Artificial Sequence: Synthetic oligonucleotide
  source 1..20: mol_type = other RNA
cctgggcaaacggccaccga

SEQ ID NO: 240 - RNA, 20 nt, synthetic construct
  misc_feature 1..20: note = Description of Artificial Sequence: Synthetic oligonucleotide
  source 1..20: mol_type = other RNA
ccatcggtggccgtttgccc

SEQ ID NO: 241 - RNA, 20 nt, synthetic construct
  misc_feature 1..20: note = Description of Artificial Sequence: Synthetic oligonucleotide
  source 1..20: mol_type = other RNA
gcaaacggccaccgatggag

SEQ ID NO: 242 - RNA, 20 nt, synthetic construct
  misc_feature 1..20: note = Description of Artificial Sequence: Synthetic oligonucleotide
  source 1..20: mol_type = other RNA
ctggcagacctctccatcgg

SEQ ID NO: 243 - RNA, 20 nt, synthetic construct
  misc_feature 1..20: note = Description of Artificial Sequence: Synthetic oligonucleotide
  source 1..20: mol_type = other RNA
ggactggcagacctctccat

SEQ ID NO: 244 - RNA, 20 nt, synthetic construct
  misc_feature 1..20: note = Description of Artificial Sequence: Synthetic oligonucleotide
  source 1..20: mol_type = other RNA
tctgattagggtgggggcgt

SEQ ID NO: 245 - RNA, 20 nt, synthetic construct
  misc_feature 1..20: note = Description of Artificial Sequence: Synthetic oligonucleotide
  source 1..20: mol_type = other RNA
cacgcccccaccctaatcag

SEQ ID NO: 246 - RNA, 20 nt, synthetic construct
  misc_feature 1..20: note = Description of Artificial Sequence: Synthetic oligonucleotide
  source 1..20: mol_type = other RNA
ttggcctctgattagggtgg

SEQ ID NO: 247 - RNA, 20 nt, synthetic construct
  misc_feature 1..20: note = Description of Artificial Sequence: Synthetic oligonucleotide
  source 1..20: mol_type = other RNA
tttggcctctgattagggtg

SEQ ID NO: 248 - RNA, 20 nt, synthetic construct
  misc_feature 1..20: note = Description of Artificial Sequence: Synthetic oligonucleotide
  source 1..20: mol_type = other RNA
gtttggcctctgattagggt

SEQ ID NO: 249 - RNA, 20 nt, synthetic construct
  misc_feature 1..20: note = Description of Artificial Sequence: Synthetic oligonucleotide
  source 1..20: mol_type = other RNA
ggtttggcctctgattaggg

SEQ ID NO: 250 - RNA, 20 nt, synthetic construct
  misc_feature 1..20: note = Description of Artificial Sequence: Synthetic oligonucleotide
  source 1..20: mol_type = other RNA
aagggtttggcctctgatta

SEQ ID NO: 251 - RNA, 20 nt, synthetic construct
  misc_feature 1..20: note = Description of Artificial Sequence: Synthetic oligonucleotide
  source 1..20: mol_type = other RNA
gaagggtttggcctctgatt

SEQ ID NO: 252 - RNA, 20 nt, synthetic construct
  misc_feature 1..20: note = Description of Artificial Sequence: Synthetic oligonucleotide
  source 1..20: mol_type = other RNA
ttgcttttatcacaggctcc

SEQ ID NO: 253 - RNA, 20 nt, synthetic construct
  misc_feature 1..20: note = Description of Artificial Sequence: Synthetic oligonucleotide
  source 1..20: mol_type = other RNA
ctaacagttgcttttatcac

SEQ ID NO: 254 - RNA, 20 nt, synthetic construct
  misc_feature 1..20: note = Description of Artificial Sequence: Synthetic oligonucleotide
  source 1..20: mol_type = other RNA
cttcaaagttgtattgaccc

SEQ ID NO: 255 - RNA, 20 nt, synthetic construct
  misc_feature 1..20: note = Description of Artificial Sequence: Synthetic oligonucleotide
  source 1..20: mol_type = other RNA
actcttagacataacacacc

SEQ ID NO: 256 - RNA, 20 nt, synthetic construct
  misc_feature 1..20: note = Description of Artificial Sequence: Synthetic oligonucleotide
  source 1..20: mol_type = other RNA
tagatgccatatctcttttc

SEQ ID NO: 257 - RNA, 20 nt, synthetic construct
  misc_feature 1..20: note = Description of Artificial Sequence: Synthetic oligonucleotide
  source 1..20: mol_type = other RNA
cataggccagaaaagagata

SEQ ID NO: 258 - RNA, 20 nt, synthetic construct
  misc_feature 1..20: note = Description of Artificial Sequence: Synthetic oligonucleotide
  source 1..20: mol_type = other RNA
ggcctatgttattacctgta

SEQ ID NO: 259 - RNA, 20 nt, synthetic construct
  misc_feature 1..20: note = Description of Artificial Sequence: Synthetic oligonucleotide
  source 1..20: mol_type = other RNA
gtccatacaggtaataacat

SEQ ID NO: 260 - RNA, 20 nt, synthetic construct
  misc_feature 1..20: note = Description of Artificial Sequence: Synthetic oligonucleotide
  source 1..20: mol_type = other RNA
tacctgtatggactttgcac

SEQ ID NO: 261 - RNA, 20 nt, synthetic construct
  misc_feature 1..20: note = Description of Artificial Sequence: Synthetic oligonucleotide
  source 1..20: mol_type = other RNA
ttccagtgcaaagtccatac

SEQ ID NO: 262 - RNA, 20 nt, synthetic construct
  misc_feature 1..20: note = Description of Artificial Sequence: Synthetic oligonucleotide
  source 1..20: mol_type = other RNA
tgctcttacttatgcacacc

SEQ ID NO: 263 - RNA, 20 nt, synthetic construct
  misc_feature 1..20: note = Description of Artificial Sequence: Synthetic oligonucleotide
  source 1..20: mol_type = other RNA
gctcttacttatgcacacct

SEQ ID NO: 264 - RNA, 20 nt, synthetic construct
  misc_feature 1..20: note = Description of Artificial Sequence: Synthetic oligonucleotide
  source 1..20: mol_type = other RNA
ctcttacttatgcacacctg

SEQ ID NO: 265 - RNA, 20 nt, synthetic construct
  misc_feature 1..20: note = Description of Artificial Sequence: Synthetic oligonucleotide
  source 1..20: mol_type = other RNA
cagggctggctctatgcccc

SEQ ID NO: 266 - RNA, 20 nt, synthetic construct
  misc_feature 1..20: note = Description of Artificial Sequence: Synthetic oligonucleotide
  source 1..20: mol_type = other RNA
gctgaaaagcgatacagggc

SEQ ID NO: 267 - RNA, 20 nt, synthetic construct
  misc_feature 1..20: note = Description of Artificial Sequence: Synthetic oligonucleotide
  source 1..20: mol_type = other RNA
gatggctgaaaagcgataca

SEQ ID NO: 268 - RNA, 20 nt, synthetic construct
  misc_feature 1..20: note = Description of Artificial Sequence: Synthetic oligonucleotide
  source 1..20: mol_type = other RNA
agatggctgaaaagcgatac

SEQ ID NO: 269 - RNA, 20 nt, synthetic construct
  misc_feature 1..20: note = Description of Artificial Sequence: Synthetic oligonucleotide
  source 1..20: mol_type = other RNA
gggagttatctgtagtgaga

SEQ ID NO: 270 - RNA, 20 nt, synthetic construct
  misc_feature 1..20: note = Description of Artificial Sequence: Synthetic oligonucleotide
  source 1..20: mol_type = other RNA
aaggcagctagacaggactt

SEQ ID NO: 271 - RNA, 20 nt, synthetic construct
  misc_feature 1..20: note = Description of Artificial Sequence: Synthetic oligonucleotide
  source 1..20: mol_type = other RNA
gaaggcagctagacaggact

SEQ ID NO: 272 - RNA, 20 nt, synthetic construct
  misc_feature 1..20: note = Description of Artificial Sequence: Synthetic oligonucleotide
  source 1..20: mol_type = other RNA
gataaggaaggcagctagac

SEQ ID NO: 273 - RNA, 20 nt, synthetic construct
  misc_feature 1..20: note = Description of Artificial Sequence: Synthetic oligonucleotide
  source 1..20: mol_type = other RNA
ctagctgccttccttatcac

SEQ ID NO: 274 - RNA, 20 nt, synthetic construct
  misc_feature 1..20: note = Description of Artificial Sequence: Synthetic oligonucleotide
  source 1..20: mol_type = other RNA
tgggtgctattcctgtgata

SEQ ID NO: 275 - RNA, 20 nt, synthetic construct
  misc_feature 1..20: note = Description of Artificial Sequence: Synthetic oligonucleotide
  source 1..20: mol_type = other RNA
tatcacaggaatagcaccca

SEQ ID NO: 276 - RNA, 20 nt, synthetic construct
  misc_feature 1..20: note = Description of Artificial Sequence: Synthetic oligonucleotide
  source 1..20: mol_type = other RNA
ctgaggtactgatggacctt

SEQ ID NO: 277 - RNA, 20 nt, synthetic construct
  misc_feature 1..20: note = Description of Artificial Sequence: Synthetic oligonucleotide
  source 1..20: mol_type = other RNA
tctgaggtactgatggacct

SEQ ID NO: 278 - RNA, 20 nt, synthetic construct
  misc_feature 1..20: note = Description of Artificial Sequence: Synthetic oligonucleotide
  source 1..20: mol_type = other RNA
agctctggaatgatggctta

SEQ ID NO: 279 - RNA, 20 nt, synthetic construct
  misc_feature 1..20: note = Description of Artificial Sequence: Synthetic oligonucleotide
  source 1..20: mol_type = other RNA
attgtggagctctggaatga

SEQ ID NO: 280 - RNA, 20 nt, synthetic construct
  misc_feature 1..20: note = Description of Artificial Sequence: Synthetic oligonucleotide
  source 1..20: mol_type = other RNA
ctggaatagaaaattggagt

SEQ ID NO: 281 - RNA, 20 nt, synthetic construct
  misc_feature 1..20: note = Description of Artificial Sequence: Synthetic oligonucleotide
  source 1..20: mol_type = other RNA
tgggtacggggaactaagac

SEQ ID NO: 282 - RNA, 20 nt, synthetic construct
  misc_feature 1..20: note = Description of Artificial Sequence: Synthetic oligonucleotide
  source 1..20: mol_type = other RNA
ttagttccccgtacccatca

SEQ ID NO: 283 - RNA, 20 nt, synthetic construct
  misc_feature 1..20: note = Description of Artificial Sequence: Synthetic oligonucleotide
  source 1..20: mol_type = other RNA
tattttccttgatgggtacg

SEQ ID NO: 284 - RNA, 20 nt, synthetic construct
  misc_feature 1..20: note = Description of Artificial Sequence: Synthetic oligonucleotide
  source 1..20: mol_type = other RNA
atattttccttgatgggtac

SEQ ID NO: 285 - RNA, 20 nt, synthetic construct
  misc_feature 1..20: note = Description of Artificial Sequence: Synthetic oligonucleotide
  source 1..20: mol_type = other RNA
aatattttccttgatgggta

SEQ ID NO: 286 - RNA, 20 nt, synthetic construct
  misc_feature 1..20: note = Description of Artificial Sequence: Synthetic oligonucleotide
  source 1..20: mol_type = other RNA
ggaaggaaatgagaacggaa

SEQ ID NO: 287 - RNA, 20 nt, synthetic construct
  misc_feature 1..20: note = Description of Artificial Sequence: Synthetic oligonucleotide
  source 1..20: mol_type = other RNA
aggaaggaaatgagaacgga

SEQ ID NO: 288 - RNA, 20 nt, synthetic construct
  misc_feature 1..20: note = Description of Artificial Sequence: Synthetic oligonucleotide
  source 1..20: mol_type = other RNA
atacttcaaggcctcaatga

SEQ ID NO: 289 - RNA, 20 nt, synthetic construct
  misc_feature 1..20: note = Description of Artificial Sequence: Synthetic oligonucleotide
  source 1..20: mol_type = other RNA
gactaggtagaccttcattg

SEQ ID NO: 290 - RNA, 20 nt, synthetic construct
  misc_feature 1..20: note = Description of Artificial Sequence: Synthetic oligonucleotide
  source 1..20: mol_type = other RNA
ttcttcttgctaaggtgact

SEQ ID NO: 291 - RNA, 20 nt, synthetic construct
  misc_feature 1..20: note = Description of Artificial Sequence: Synthetic oligonucleotide
  source 1..20: mol_type = other RNA
gagattgattcttcttgcta

SEQ ID NO: 292 - RNA, 20 nt, synthetic construct
  misc_feature 1..20: note = Description of Artificial Sequence: Synthetic oligonucleotide
  source 1..20: mol_type = other RNA
gtgttctatgaggttggaga

SEQ ID NO: 293 - RNA, 20 nt, synthetic construct
  misc_feature 1..20: note = Description of Artificial Sequence: Synthetic oligonucleotide
  source 1..20: mol_type = other RNA
ggatgagtgttctatgaggt

SEQ ID NO: 294 - RNA, 20 nt, synthetic construct
  misc_feature 1..20: note = Description of Artificial Sequence: Synthetic oligonucleotide
  source 1..20: mol_type = other RNA
catgggatgagtgttctatg

SEQ ID NO: 295 - RNA, 20 nt, synthetic construct
  misc_feature 1..20: note = Description of Artificial Sequence: Synthetic oligonucleotide
  source 1..20: mol_type = other RNA
tgagtcagggagtggtgcat

SEQ ID NO: 296 - RNA, 20 nt, synthetic construct
  misc_feature 1..20: note = Description of Artificial Sequence: Synthetic oligonucleotide
  source 1..20: mol_type = other RNA
atgagtcagggagtggtgca

SEQ ID NO: 297 - RNA, 20 nt, synthetic construct
  misc_feature 1..20: note = Description of Artificial Sequence: Synthetic oligonucleotide
  source 1..20: mol_type = other RNA
ccactccctgactcatatct

SEQ ID NO: 298 - RNA, 20 nt, synthetic construct
  misc_feature 1..20: note = Description of Artificial Sequence: Synthetic oligonucleotide
  source 1..20: mol_type = other RNA
taaggcctagatatgagtca

SEQ ID NO: 299 - RNA, 20 nt, synthetic construct
  misc_feature 1..20: note = Description of Artificial Sequence: Synthetic oligonucleotide
  source 1..20: mol_type = other RNA
gtaaggcctagatatgagtc

SEQ ID NO: 300 - RNA, 20 nt, synthetic construct
  misc_feature 1..20: note = Description of Artificial Sequence: Synthetic oligonucleotide
  source 1..20: mol_type = other RNA
atatctaggccttacattgc

SEQ ID NO: 301 - RNA, 20 nt, synthetic construct
  misc_feature 1..20: note = Description of Artificial Sequence: Synthetic oligonucleotide
  source 1..20: mol_type = other RNA
aaattaattagaggcataga

SEQ ID NO: 302 - RNA, 20 nt, synthetic construct
  misc_feature 1..20: note = Description of Artificial Sequence: Synthetic oligonucleotide
  source 1..20: mol_type = other RNA
gaaattaattagaggcatag

SEQ ID NO: 303 - RNA, 20 nt, synthetic construct
  misc_feature 1..20: note = Description of Artificial Sequence: Synthetic oligonucleotide
  source 1..20: mol_type = other RNA
gaacacatgaaattaattag

SEQ ID NO: 304 - RNA, 20 nt, synthetic construct
  misc_feature 1..20: note = Description of Artificial Sequence: Synthetic oligonucleotide
  source 1..20: mol_type = other RNA
ccaatgagtttcttcaatac

SEQ ID NO: 305 - RNA, 20 nt, synthetic construct
  misc_feature 1..20: note = Description of Artificial Sequence: Synthetic oligonucleotide
  source 1..20: mol_type = other RNA
caaatataatagaagcaagt

SEQ ID NO: 306 - RNA, 20 nt, synthetic construct
  misc_feature 1..20: note = Description of Artificial Sequence: Synthetic oligonucleotide
  source 1..20: mol_type = other RNA
aaataacttcccttttagga

SEQ ID NO: 307 - RNA, 20 nt, synthetic construct
  misc_feature 1..20: note = Description of Artificial Sequence: Synthetic oligonucleotide
  source 1..20: mol_type = other RNA
ggaaaaataacttccctttt

SEQ ID NO: 308 - RNA, 20 nt, synthetic construct
  misc_feature 1..20: note = Description of Artificial Sequence: Synthetic oligonucleotide
  source 1..20: mol_type = other RNA
ttttgaacagaaatgatatt

SEQ ID NO: 309 - RNA, 20 nt, synthetic construct
  misc_feature 1..20: note = Description of Artificial Sequence: Synthetic oligonucleotide
  source 1..20: mol_type = other RNA
agttcaagtagatatcagaa

SEQ ID NO: 310 - RNA, 20 nt, synthetic construct
  misc_feature 1..20: note = Description of Artificial Sequence: Synthetic oligonucleotide
  source 1..20: mol_type = other RNA
aagttcaagtagatatcaga

SEQ ID NO: 311 - RNA, 20 nt, synthetic construct
  misc_feature 1..20: note = Description of Artificial Sequence: Synthetic oligonucleotide
  source 1..20: mol_type = other RNA
gggtggctgtttaaagaggg

SEQ ID NO: 312 - RNA, 20 nt, synthetic construct
  misc_feature 1..20: note = Description of Artificial Sequence: Synthetic oligonucleotide
  source 1..20: mol_type = other RNA
gtggggtggctgtttaaaga

SEQ ID NO: 313 - RNA, 20 nt, synthetic construct
  misc_feature 1..20: note = Description of Artificial Sequence: Synthetic oligonucleotide
  source 1..20: mol_type = other RNA
tgtggggtggctgtttaaag

SEQ ID NO: 314 - RNA, 20 nt, synthetic construct
  misc_feature 1..20: note = Description of Artificial Sequence: Synthetic oligonucleotide
  source 1..20: mol_type = other RNA
tgccaaccagactgtgcgcc

SEQ ID NO: 315 - RNA, 20 nt, synthetic construct
  misc_feature 1..20: note = Description of Artificial Sequence: Synthetic oligonucleotide
  source 1..20: mol_type = other RNA
aacctggcgcacagtctggt

SEQ ID NO: 316 - RNA, 20 nt, synthetic construct
  misc_feature 1..20: note = Description of Artificial Sequence: Synthetic oligonucleotide
  source 1..20: mol_type = other RNA
aaccagactgtgcgccaggt

SEQ ID NO: 317 - RNA, 20 nt, synthetic construct
  misc_feature 1..20: note = Description of Artificial Sequence: Synthetic oligonucleotide
  source 1..20: mol_type = other RNA
taccaacctggcgcacagtc

SEQ ID NO: 318 - RNA, 20 nt, synthetic construct
  misc_feature 1..20: note = Description of Artificial Sequence: Synthetic oligonucleotide
  source 1..20: mol_type = other RNA
tctgtcagactttaccaacc

SEQ ID NO: 319 - RNA, 20 nt, synthetic construct
  misc_feature 1..20: note = Description of Artificial Sequence: Synthetic oligonucleotide
  source 1..20: mol_type = other RNA
atatgtgaagcccaactacg

SEQ ID NO: 320 - RNA, 20 nt, synthetic construct
  misc_feature 1..20: note = Description of Artificial Sequence: Synthetic oligonucleotide
  source 1..20: mol_type = other RNA
agttgcacaaccacgtagtt

SEQ ID NO: 321 - RNA, 20 nt, synthetic construct
  misc_feature 1..20: note = Description of Artificial Sequence: Synthetic oligonucleotide
  source 1..20: mol_type = other RNA
gagttgcacaaccacgtagt

SEQ ID NO: 322 - RNA, 20 nt, synthetic construct
  misc_feature 1..20: note = Description of Artificial Sequence: Synthetic oligonucleotide
  source 1..20: mol_type = other RNA
ctatagctgactttcaacca

SEQ ID NO: 323 - RNA, 20 nt, synthetic construct
  misc_feature 1..20: note = Description of Artificial Sequence: Synthetic oligonucleotide
  source 1..20: mol_type = other RNA
aacttctttgcagatgacca

SEQ ID NO: 324 - RNA, 20 nt, synthetic construct
  misc_feature 1..20: note = Description of Artificial Sequence: Synthetic oligonucleotide
  source 1..20: mol_type = other RNA
ttgcattgaggatgcgcagg

SEQ ID NO: 325 - RNA, 20 nt, synthetic construct
  misc_feature 1..20: note = Description of Artificial Sequence: Synthetic oligonucleotide
  source 1..20: mol_type = other RNA
tttttgcattgaggatgcgc

SEQ ID NO: 326 - RNA, 20 nt, synthetic construct
  misc_feature 1..20: note = Description of Artificial Sequence: Synthetic oligonucleotide
  source 1..20: mol_type = other RNA
gacctcattttgatgccaga

SEQ ID NO: 327 - RNA, 20 nt, synthetic construct
  misc_feature 1..20: note = Description of Artificial Sequence: Synthetic oligonucleotide
  source 1..20: mol_type = other RNA
tgccctctggcatcaaaatg

SEQ ID NO: 328 - RNA, 20 nt, synthetic construct
  misc_feature 1..20: note = Description of Artificial Sequence: Synthetic oligonucleotide
  source 1..20: mol_type = other RNA
atgccagagggcagcaaaca

SEQ ID NO: 329 - RNA, 20 nt, synthetic construct
  misc_feature 1..20: note = Description of Artificial Sequence: Synthetic oligonucleotide
  source 1..20: mol_type = other RNA
ctgtacttaatagctgaagg

SEQ ID NO: 330 - RNA, 20 nt, synthetic construct
  misc_feature 1..20: note = Description of Artificial Sequence: Synthetic oligonucleotide
  source 1..20: mol_type = other RNA
actgtacttaatagctgaag

SEQ ID NO: 331 - RNA, 20 nt, synthetic construct
  misc_feature 1..20: note = Description of Artificial Sequence: Synthetic oligonucleotide
  source 1..20: mol_type = other RNA
cagctattaagtacagtaaa

SEQ ID NO: 332 - RNA, 20 nt, synthetic construct
  misc_feature 1..20: note = Description of Artificial Sequence: Synthetic oligonucleotide
  source 1..20: mol_type = other RNA
gagcatttcaaatgatagtt

SEQ ID NO: 333 - RNA, 20 nt, synthetic construct
  misc_feature 1..20: note = Description of Artificial Sequence: Synthetic oligonucleotide
  source 1..20: mol_type = other RNA
catttgaaatgctcccggcc

SEQ ID NO: 334 - RNA, 20 nt, synthetic construct
  misc_feature 1..20: note = Description of Artificial Sequence: Synthetic oligonucleotide
  source 1..20: mol_type = other RNA
ttagggtgggggcgtgggtg

SEQ ID NO: 335 - RNA, 20 nt, synthetic construct
  misc_feature 1..20: note = Description of Artificial Sequence: Synthetic oligonucleotide
  source 1..20: mol_type = other RNA
ttttatcacaggctccagga

SEQ ID NO: 336 - RNA, 20 nt, synthetic construct
  misc_feature 1..20: note = Description of Artificial Sequence: Synthetic oligonucleotide
  source 1..20: mol_type = other RNA
tttatcacaggctccaggaa

SEQ ID NO: 337 - RNA, 20 nt, synthetic construct
  misc_feature 1..20: note = Description of Artificial Sequence: Synthetic oligonucleotide
  source 1..20: mol_type = other RNA
cacaggctccaggaagggtt

SEQ ID NO: 338 - RNA, 20 nt, synthetic construct
  misc_feature 1..20: note = Description of Artificial Sequence: Synthetic oligonucleotide
  source 1..20: mol_type = other RNA
atcagaggccaaacccttcc

SEQ ID NO: 339 - RNA, 20 nt, synthetic construct
  misc_feature 1..20: note = Description of Artificial Sequence: Synthetic oligonucleotide
  source 1..20: mol_type = other RNA
ctctgattagggtgggggcg

SEQ ID NO: 340 - RNA, 20 nt, synthetic construct
  misc_feature 1..20: note = Description of Artificial Sequence: Synthetic oligonucleotide
  source 1..20: mol_type = other RNA
gattagggtgggggcgtggg

SEQ ID NO: 341 - RNA, 20 nt, synthetic construct
  misc_feature 1..20: note = Description of Artificial Sequence: Synthetic oligonucleotide
  source 1..20: mol_type = other RNA
attagggtgggggcgtgggt

SEQ ID NO: 342 - RNA, 100 nt, synthetic construct
  misc_feature 1..100: note = Description of Artificial Sequence: Synthetic polynucleotide
  source 1..100: mol_type = other RNA
gtttggcctctgattagggtgttttagagctagaaatagcaagttaaaataaggctagtccgttatcaacttgaaaaagtggcaccgagtcggtgctttt

SEQ ID NO: 343 - RNA, 100 nt, synthetic construct; identical to SEQ ID NO: 342
  misc_feature 1..100: note = Description of Artificial Sequence: Synthetic polynucleotide
  source 1..100: mol_type = other RNA
  modified_base 1: mod_base = OTHER; note = 2'-O-methyl modified nucleotide with phosphorothioate linkage
  modified_base 2: mod_base = OTHER; note = 2'-O-methyl modified nucleotide with phosphorothioate linkage
  modified_base 3: mod_base = OTHER; note = 2'-O-methyl modified nucleotide with phosphorothioate linkage
  modified_base 97: mod_base = OTHER; note = nucleotide with phosphorothioate linkage
  modified_base 98: mod_base = OTHER; note = 2'-O-methyl modified nucleotide with phosphorothioate linkage
  modified_base 99: mod_base = OTHER; note = 2'-O-methyl modified nucleotide with phosphorothioate linkage
  modified_base 100: mod_base = OTHER; note = 2'-O-methyl modified nucleotide

SEQ ID NO: 344 - RNA, 42 nt, synthetic construct
  misc_feature 1..42: note = Description of Artificial Sequence: Synthetic oligonucleotide
  source 1..42: mol_type = other RNA
gtttggcctctgattagggtgttttagagctatgctgttttg

SEQ ID NO: 345 - RNA, 42 nt, synthetic construct; identical to SEQ ID NO: 344
  misc_feature 1..42: note = Description of Artificial Sequence: Synthetic oligonucleotide
  source 1..42: mol_type = other RNA
  modified_base 1: mod_base = OTHER; note = 2'-O-methyl modified nucleotide with phosphorothioate linkage
  modified_base 2: mod_base = OTHER; note = 2'-O-methyl modified nucleotide with phosphorothioate linkage
  modified_base 3: mod_base = OTHER; note = 2'-O-methyl modified nucleotide with phosphorothioate linkage
  modified_base 39: mod_base = OTHER; note = nucleotide with phosphorothioate linkage
  modified_base 40: mod_base = OTHER; note = 2'-O-methyl modified nucleotide with phosphorothioate linkage
  modified_base 41: mod_base = OTHER; note = 2'-O-methyl modified nucleotide with phosphorothioate linkage
  modified_base 42: mod_base = OTHER; note = 2'-O-methyl modified nucleotide

SEQ ID NO: 346 - RNA, 74 nt, synthetic construct
  misc_feature 1..74: note = Description of Artificial Sequence: Synthetic oligonucleotide
  source 1..74: mol_type = other RNA
  modified_base 1: mod_base = OTHER; note = 2'-O-methyl modified nucleotide with phosphorothioate linkage
  modified_base 2: mod_base = OTHER; note = 2'-O-methyl modified nucleotide with phosphorothioate linkage
  modified_base 3: mod_base = OTHER; note = 2'-O-methyl modified nucleotide with phosphorothioate linkage
  modified_base 71: mod_base = OTHER; note = nucleotide with phosphorothioate linkage
  modified_base 72: mod_base = OTHER; note = 2'-O-methyl modified nucleotide with phosphorothioate linkage
  modified_base 73: mod_base = OTHER; note = 2'-O-methyl modified nucleotide with phosphorothioate linkage
  modified_base 74: mod_base = OTHER; note = 2'-O-methyl modified nucleotide
aacagcatagcaagttaaaataaggctagtccgttatcaacttgaaaaagtggcaccgagtcggtgcttttttt

SEQ ID NO: 347 - RNA, 100 nt, synthetic construct
  misc_feature 1..100: note = Description of Artificial Sequence: Synthetic polynucleotide
  source 1..100: mol_type = other RNA
atcagaggccaaacccttccgttttagagctagaaatagcaagttaaaataaggctagtccgttatcaacttgaaaaagtggcaccgagtcggtgctttt

SEQ ID NO: 348 - RNA, 100 nt, synthetic construct; identical to SEQ ID NO: 347
  misc_feature 1..100: note = Description of Artificial Sequence: Synthetic polynucleotide
  source 1..100: mol_type = other RNA
  modified_base 1: mod_base = OTHER; note = 2'-O-methyl modified nucleotide with phosphorothioate linkage
  modified_base 2: mod_base = OTHER; note = 2'-O-methyl modified nucleotide with phosphorothioate linkage
  modified_base 3: mod_base = OTHER; note = 2'-O-methyl modified nucleotide with phosphorothioate linkage
  modified_base 97: mod_base = OTHER; note = nucleotide with phosphorothioate linkage
  modified_base 98: mod_base = OTHER; note = 2'-O-methyl modified nucleotide with phosphorothioate linkage
  modified_base 99: mod_base = OTHER; note = 2'-O-methyl modified nucleotide with phosphorothioate linkage
  modified_base 100: mod_base = OTHER; note = 2'-O-methyl modified nucleotide

SEQ ID NO: 349 - RNA, 42 nt, synthetic construct
  misc_feature 1..42: note = Description of Artificial Sequence: Synthetic oligonucleotide
  source 1..42: mol_type = other RNA
atcagaggccaaacccttccgttttagagctatgctgttttg

SEQ ID NO: 350 - RNA, 42 nt, synthetic construct; identical to SEQ ID NO: 349
  misc_feature 1..42: note = Description of Artificial Sequence: Synthetic oligonucleotide
  source 1..42: mol_type = other RNA
  modified_base 1: mod_base = OTHER; note = 2'-O-methyl modified nucleotide with phosphorothioate linkage
  modified_base 2: mod_base = OTHER; note = 2'-O-methyl modified nucleotide with phosphorothioate linkage
  modified_base 3: mod_base = OTHER; note = 2'-O-methyl modified nucleotide with phosphorothioate linkage
  modified_base 39: mod_base = OTHER; note = nucleotide with phosphorothioate linkage
  modified_base 40: mod_base = OTHER; note = 2'-O-methyl modified nucleotide with phosphorothioate linkage
  modified_base 41: mod_base = OTHER; note = 2'-O-methyl modified nucleotide with phosphorothioate linkage
  modified_base 42: mod_base = OTHER; note = 2'-O-methyl modified nucleotide

SEQ ID NO: 351 - RNA, 100 nt, synthetic construct
  misc_feature 1..100: note = Description of Artificial Sequence: Synthetic polynucleotide
  source 1..100: mol_type = other RNA
tttatcacaggctccaggaagttttagagctagaaatagcaagttaaaataaggctagtccgttatcaacttgaaaaagtggcaccgagtcggtgctttt

SEQ ID NO: 352 - RNA, 100 nt, synthetic construct; identical to SEQ ID NO: 351
  misc_feature 1..100: note = Description of Artificial Sequence: Synthetic polynucleotide
  source 1..100: mol_type = other RNA
  modified_base 1: mod_base = OTHER; note = 2'-O-methyl modified nucleotide with phosphorothioate linkage
  modified_base 2: mod_base = OTHER; note = 2'-O-methyl modified nucleotide with phosphorothioate linkage
  modified_base 3: mod_base = OTHER; note = 2'-O-methyl modified nucleotide with phosphorothioate linkage
  modified_base 97: mod_base = OTHER; note = nucleotide with phosphorothioate linkage
  modified_base 98: mod_base = OTHER; note = 2'-O-methyl modified nucleotide with phosphorothioate linkage
  modified_base 99: mod_base = OTHER; note = 2'-O-methyl modified nucleotide with phosphorothioate linkage
  modified_base 100: mod_base = OTHER; note = 2'-O-methyl modified nucleotide

SEQ ID NO: 353 - RNA, 42 nt, synthetic construct
  misc_feature 1..42: note = Description of Artificial Sequence: Synthetic oligonucleotide
  source 1..42: mol_type = other RNA
tttatcacaggctccaggaagttttagagctatgctgttttg

SEQ ID NO: 354 - RNA, 42 nt, synthetic construct; identical to SEQ ID NO: 353
  misc_feature 1..42: note = Description of Artificial Sequence: Synthetic oligonucleotide
  source 1..42: mol_type = other RNA
  modified_base 1: mod_base = OTHER; note = 2'-O-methyl modified nucleotide with phosphorothioate linkage
  modified_base 2: mod_base = OTHER; note = 2'-O-methyl modified nucleotide with phosphorothioate linkage
  modified_base 3: mod_base = OTHER; note = 2'-O-methyl modified nucleotide with phosphorothioate linkage
  modified_base 39: mod_base = OTHER; note = nucleotide with phosphorothioate linkage
  modified_base 40: mod_base = OTHER; note = 2'-O-methyl modified nucleotide with phosphorothioate linkage
  modified_base 41: mod_base = OTHER; note = 2'-O-methyl modified nucleotide with phosphorothioate linkage
  modified_base 42: mod_base = OTHER; note = 2'-O-methyl modified nucleotide

SEQ ID NO: 355 - RNA, 100 nt, synthetic construct
  misc_feature 1..100: note = Description of Artificial Sequence: Synthetic polynucleotide
  source 1..100: mol_type = other RNA
tttggcctctgattagggtggttttagagctagaaatagcaagttaaaataaggctagtccgttatcaacttgaaaaagtggcaccgagtcggtgctttt

SEQ ID NO: 356 - RNA, 100 nt, synthetic construct; identical to SEQ ID NO: 355
  misc_feature 1..100: note = Description of Artificial Sequence: Synthetic polynucleotide
  source 1..100: mol_type = other RNA
  modified_base 1: mod_base = OTHER; note = 2'-O-methyl modified nucleotide with phosphorothioate linkage
  modified_base 2: mod_base = OTHER; note = 2'-O-methyl modified nucleotide with phosphorothioate linkage
  modified_base 3: mod_base = OTHER; note = 2'-O-methyl modified nucleotide with phosphorothioate linkage
  modified_base 97: mod_base = OTHER; note = nucleotide with phosphorothioate linkage
  modified_base 98: mod_base = OTHER; note = 2'-O-methyl modified nucleotide with phosphorothioate linkage
  modified_base 99: mod_base = OTHER; note = 2'-O-methyl modified nucleotide with phosphorothioate linkage
  modified_base 100: mod_base = OTHER; note = 2'-O-methyl modified nucleotide

SEQ ID NO: 357 - RNA, 42 nt, synthetic construct
  misc_feature 1..42: note = Description of Artificial Sequence: Synthetic oligonucleotide
  source 1..42: mol_type = other RNA
tttggcctctgattagggtggttttagagctatgctgttttg

SEQ ID NO: 358 - RNA, 42 nt, synthetic construct; identical to SEQ ID NO: 357
  misc_feature 1..42: note = Description of Artificial Sequence: Synthetic oligonucleotide
  source 1..42: mol_type = other RNA
  modified_base 1: mod_base = OTHER; note = 2'-O-methyl modified nucleotide with phosphorothioate linkage
  modified_base 2: mod_base = OTHER; note = 2'-O-methyl modified nucleotide with phosphorothioate linkage
  modified_base 3: mod_base = OTHER; note = 2'-O-methyl modified nucleotide with phosphorothioate linkage
  modified_base 39: mod_base = OTHER; note = nucleotide with phosphorothioate linkage
  modified_base 40: mod_base = OTHER; note = 2'-O-methyl modified nucleotide with phosphorothioate linkage
  modified_base 41: mod_base = OTHER; note = 2'-O-methyl modified nucleotide with phosphorothioate linkage
  modified_base 42: mod_base = OTHER; note = 2'-O-methyl modified nucleotide

SEQ ID NO: 359 - RNA, 100 nt, synthetic construct
  misc_feature 1..100: note = Description of Artificial Sequence: Synthetic polynucleotide
  source 1..100: mol_type = other RNA
cacgcccccaccctaatcaggttttagagctagaaatagcaagttaaaataaggctagtccgttatcaacttgaaaaagtggcaccgagtcggtgctttt

SEQ ID NO: 360 - RNA, 100 nt, synthetic construct; identical to SEQ ID NO: 359
  misc_feature 1..100: note = Description of Artificial Sequence: Synthetic polynucleotide
  source 1..100: mol_type = other RNA
  modified_base 1: mod_base = OTHER; note = 2'-O-methyl modified nucleotide with phosphorothioate linkage
  modified_base 2: mod_base = OTHER; note = 2'-O-methyl modified nucleotide with phosphorothioate linkage
  modified_base 3: mod_base = OTHER; note = 2'-O-methyl modified nucleotide with phosphorothioate linkage
  modified_base 97: mod_base = OTHER; note = nucleotide with phosphorothioate linkage
  modified_base 98: mod_base = OTHER; note = 2'-O-methyl modified nucleotide with phosphorothioate linkage
  modified_base 99: mod_base = OTHER; note = 2'-O-methyl modified nucleotide with phosphorothioate linkage
  modified_base 100: mod_base = OTHER; note = 2'-O-methyl modified nucleotide

SEQ ID NO: 361 - RNA, 42 nt, synthetic construct
  misc_feature 1..42: note = Description of Artificial Sequence: Synthetic oligonucleotide
  source 1..42: mol_type = other RNA
cacgcccccaccctaatcaggttttagagctatgctgttttg

SEQ ID NO: 362 - RNA, 42 nt, synthetic construct; identical to SEQ ID NO: 361
  misc_feature 1..42: note = Description of Artificial Sequence: Synthetic oligonucleotide
  source 1..42: mol_type = other RNA
  modified_base 1: mod_base = OTHER; note = 2'-O-methyl modified nucleotide with phosphorothioate linkage
  modified_base 2: mod_base = OTHER; note = 2'-O-methyl modified nucleotide with phosphorothioate linkage
  modified_base 3: mod_base = OTHER; note = 2'-O-methyl modified nucleotide with phosphorothioate linkage
  modified_base 39: mod_base = OTHER; note = nucleotide with phosphorothioate linkage
  modified_base 40: mod_base = OTHER; note = 2'-O-methyl modified nucleotide with phosphorothioate linkage
  modified_base 41: mod_base = OTHER; note = 2'-O-methyl modified nucleotide with phosphorothioate linkage
  modified_base 42: mod_base = OTHER; note = 2'-O-methyl modified nucleotide

SEQ ID NO: 363 - RNA, 100 nt, synthetic construct
  misc_feature 1..100: note = Description of Artificial Sequence: Synthetic polynucleotide
  source 1..100: mol_type = other RNA
cacaggctccaggaagggttgttttagagctagaaatagcaagttaaaataaggctagtccgttatcaacttgaaaaagtggcaccgagtcggtgctttt

SEQ ID NO: 364 - RNA, 100 nt, synthetic construct; identical to SEQ ID NO: 363
  misc_feature 1..100: note = Description of Artificial Sequence: Synthetic polynucleotide
  source 1..100: mol_type = other RNA
  modified_base 1: mod_base = OTHER; note = 2'-O-methyl modified nucleotide with phosphorothioate linkage
  modified_base 2: mod_base = OTHER; note = 2'-O-methyl modified nucleotide with phosphorothioate linkage
  modified_base 3: mod_base = OTHER; note = 2'-O-methyl modified nucleotide with phosphorothioate linkage
  modified_base 97: mod_base = OTHER; note = nucleotide with phosphorothioate linkage
  modified_base 98: mod_base = OTHER; note = 2'-O-methyl modified nucleotide with phosphorothioate linkage
  modified_base 99: mod_base = OTHER; note = 2'-O-methyl modified nucleotide with phosphorothioate linkage
  modified_base 100: mod_base = OTHER; note = 2'-O-methyl modified nucleotide

SEQ ID NO: 365 - RNA, 42 nt, synthetic construct
  misc_feature 1..42: note = Description of Artificial Sequence: Synthetic oligonucleotide
  source 1..42: mol_type = other RNA
cacaggctccaggaagggttgttttagagctatgctgttttg

SEQ ID NO: 366 - RNA, 42 nt, synthetic construct; identical to SEQ ID NO: 365
  misc_feature 1..42: note = Description of Artificial Sequence: Synthetic oligonucleotide
  source 1..42: mol_type = other RNA
  modified_base 1: mod_base = OTHER; note = 2'-O-methyl modified nucleotide with phosphorothioate linkage
  modified_base 2: mod_base = OTHER; note = 2'-O-methyl modified nucleotide with phosphorothioate linkage
  modified_base 3: mod_base = OTHER; note = 2'-O-methyl modified nucleotide with phosphorothioate linkage
  modified_base 39: mod_base = OTHER; note = nucleotide with phosphorothioate linkage
  modified_base 40: mod_base = OTHER; note = 2'-O-methyl modified nucleotide with phosphorothioate linkage
  modified_base 41: mod_base = OTHER; note = 2'-O-methyl modified nucleotide with phosphorothioate linkage
  modified_base 42: mod_base = OTHER; note = 2'-O-methyl modified nucleotide

SEQ ID NO: 367 - RNA, 100 nt, synthetic construct
  misc_feature 1..100: note = Description of Artificial Sequence: Synthetic polynucleotide
  source 1..100: mol_type = other RNA
ttgcttttatcacaggctccgttttagagctagaaatagcaagttaaaataaggctagtccgttatcaacttgaaaaagtggcaccgagtcggtgctttt

SEQ ID NO: 368 - RNA, 100 nt, synthetic construct; identical to SEQ ID NO: 367
  misc_feature 1..100: note = Description of Artificial Sequence: Synthetic polynucleotide
  source 1..100: mol_type = other RNA
  modified_base 1: mod_base = OTHER; note = 2'-O-methyl modified nucleotide with phosphorothioate linkage
  modified_base 2: mod_base = OTHER; note = 2'-O-methyl modified nucleotide with phosphorothioate linkage
  modified_base 3: mod_base = OTHER; note = 2'-O-methyl modified nucleotide with phosphorothioate linkage
  modified_base 97: mod_base = OTHER; note = nucleotide with phosphorothioate linkage
  modified_base 98: mod_base = OTHER; note = 2'-O-methyl modified nucleotide with phosphorothioate linkage
  modified_base 99: mod_base = OTHER; note = 2'-O-methyl modified nucleotide with phosphorothioate linkage
  modified_base 100: mod_base = OTHER; note = 2'-O-methyl modified nucleotide

SEQ ID NO: 369 - RNA, 42 nt, synthetic construct
  misc_feature 1..42: note = Description of Artificial Sequence: Synthetic oligonucleotide
  source 1..42: mol_type = other RNA
ttgcttttatcacaggctccgttttagagctatgctgttttg

SEQ ID NO: 370 - RNA, 42 nt, synthetic construct; identical to SEQ ID NO: 369
  misc_feature 1..42: note = Description of Artificial Sequence: Synthetic oligonucleotide
  source 1..42: mol_type = other RNA
  modified_base 1: mod_base = OTHER; note = 2'-O-methyl modified nucleotide with phosphorothioate linkage
  modified_base 2: mod_base = OTHER; note = 2'-O-methyl modified nucleotide with phosphorothioate linkage
  modified_base 3: mod_base = OTHER; note = 2'-O-methyl modified nucleotide with phosphorothioate linkage
  modified_base 39: mod_base = OTHER; note = nucleotide with phosphorothioate linkage
  modified_base 40: mod_base = OTHER; note = 2'-O-methyl modified nucleotide with phosphorothioate linkage
  modified_base 41: mod_base = OTHER; note = 2'-O-methyl modified nucleotide with phosphorothioate linkage
  modified_base 42: mod_base = OTHER; note = 2'-O-methyl modified nucleotide

SEQ ID NO: 371 - RNA, 100 nt, synthetic construct
  misc_feature 1..100: note = Description of Artificial Sequence: Synthetic polynucleotide
  source 1..100: mol_type = other RNA
ttttatcacaggctccaggagttttagagctagaaatagcaagttaaaataaggctagtccgttatcaacttgaaaaagtggcaccgagtcggtgctttt

SEQ ID NO: 372 - RNA, 100 nt, synthetic construct; identical to SEQ ID NO: 371
  misc_feature 1..100: note = Description of Artificial Sequence: Synthetic polynucleotide
  source 1..100: mol_type = other RNA
  modified_base 1: mod_base = OTHER; note = 2'-O-methyl modified nucleotide with phosphorothioate linkage
  modified_base 2: mod_base = OTHER; note = 2'-O-methyl modified nucleotide with phosphorothioate linkage
  modified_base 3: mod_base = OTHER; note = 2'-O-methyl modified nucleotide with phosphorothioate linkage
  modified_base 97: mod_base = OTHER; note = nucleotide with phosphorothioate linkage
  modified_base 98: mod_base = OTHER; note = 2'-O-methyl modified nucleotide with phosphorothioate linkage
  modified_base 99: mod_base = OTHER; note = 2'-O-methyl modified nucleotide with phosphorothioate linkage
  modified_base 100: mod_base = OTHER; note = 2'-O-methyl modified nucleotide

SEQ ID NO: 373 - RNA, 42 nt, synthetic construct
  misc_feature 1..42: note = Description of Artificial Sequence: Synthetic oligonucleotide
  source 1..42: mol_type = other RNA
ttttatcacaggctccaggagttttagagctatgctgttttg

SEQ ID NO: 374 - RNA, 42 nt, synthetic construct; identical to SEQ ID NO: 373
  misc_feature 1..42: note = Description of Artificial Sequence: Synthetic oligonucleotide
  source 1..42: mol_type = other RNA
  modified_base 1: mod_base = OTHER; note = 2'-O-methyl modified nucleotide with phosphorothioate linkage
  modified_base 2: mod_base = OTHER; note = 2'-O-methyl modified nucleotide with phosphorothioate linkage
  modified_base 3: mod_base = OTHER; note = 2'-O-methyl modified nucleotide with phosphorothioate linkage
  modified_base 39: mod_base = OTHER; note = nucleotide with phosphorothioate linkage
  modified_base 40: mod_base = OTHER; note = 2'-O-methyl modified nucleotide with phosphorothioate linkage
  modified_base 41: mod_base = OTHER; note = 2'-O-methyl modified nucleotide with phosphorothioate linkage
  modified_base 42: mod_base = OTHER; note = 2'-O-methyl modified nucleotide

SEQ ID NO: 375 - RNA, 100 nt, synthetic construct
  misc_feature 1..100: note = Description of Artificial Sequence: Synthetic polynucleotide
  source 1..100: mol_type = other RNA
actgctgaaagagatgcggtgttttagagctagaaatagcaagttaaaataaggctagtccgttatcaacttgaaaaagtggcaccgagtcggtgctttt

SEQ ID NO: 376 - RNA, 100 nt, synthetic construct; identical to SEQ ID NO: 375
  misc_feature 1..100: note = Description of Artificial Sequence: Synthetic polynucleotide
  source 1..100: mol_type = other RNA
  modified_base 1: mod_base = OTHER; note = 2'-O-methyl modified nucleotide with phosphorothioate linkage
  modified_base 2: mod_base = OTHER; note = 2'-O-methyl modified nucleotide with phosphorothioate linkage
  modified_base 3: mod_base = OTHER; note = 2'-O-methyl modified nucleotide with phosphorothioate linkage
  modified_base 97: mod_base = OTHER; note = nucleotide with phosphorothioate linkage
  modified_base 98: mod_base = OTHER; note = 2'-O-methyl modified nucleotide with phosphorothioate linkage
  modified_base 99: mod_base = OTHER; note = 2'-O-methyl modified nucleotide with phosphorothioate linkage
  modified_base 100: mod_base = OTHER; note = 2'-O-methyl modified nucleotide

SEQ ID NO: 377 - RNA, 42 nt, synthetic construct
  misc_feature 1..42: note = Description of Artificial Sequence: Synthetic oligonucleotide
  source 1..42: mol_type = other RNA
actgctgaaagagatgcggtgttttagagctatgctgttttg

SEQ ID NO: 378 - RNA, 42 nt, synthetic construct; identical to SEQ ID NO: 377
  misc_feature 1..42: note = Description of Artificial Sequence: Synthetic oligonucleotide
  source 1..42: mol_type = other RNA
  modified_base 1: mod_base = OTHER; note = 2'-O-methyl modified nucleotide with phosphorothioate linkage
  modified_base 2: mod_base = OTHER; note = 2'-O-methyl modified nucleotide with phosphorothioate linkage
  modified_base 3: mod_base = OTHER; note = 2'-O-methyl modified nucleotide with phosphorothioate linkage
  modified_base 39: mod_base = OTHER; note = nucleotide with phosphorothioate linkage
  modified_base 40: mod_base = OTHER; note = 2'-O-methyl modified nucleotide with phosphorothioate linkage
  modified_base 41: mod_base = OTHER; note = 2'-O-methyl modified nucleotide with phosphorothioate linkage
  modified_base 42: mod_base = OTHER; note = 2'-O-methyl modified nucleotide

SEQ ID NO: 379 - RNA, 100 nt, synthetic construct
  misc_feature 1..100: note = Description of Artificial Sequence: Synthetic polynucleotide
  source 1..100: mol_type = other RNA
tgcggtggggagatatgtaggttttagagctagaaatagcaagttaaaataaggctagtccgttatcaacttgaaaaagtggcaccgagtcggtgctttt

SEQ ID NO: 380 - RNA, 100 nt, synthetic construct; identical to SEQ ID NO: 379
  misc_feature 1..100: note = Description of Artificial Sequence: Synthetic polynucleotide
  source 1..100: mol_type = other RNA
  modified_base 1: mod_base = OTHER; note = 2'-O-methyl modified nucleotide with phosphorothioate linkage
  modified_base 2: mod_base = OTHER; note = 2'-O-methyl modified nucleotide with phosphorothioate linkage
  modified_base 3: mod_base = OTHER; note = 2'-O-methyl modified nucleotide with phosphorothioate linkage
  modified_base 97: mod_base = OTHER; note = nucleotide with phosphorothioate linkage
  modified_base 98: mod_base = OTHER; note = 2'-O-methyl modified nucleotide with phosphorothioate linkage
  modified_base 99: mod_base = OTHER; note = 2'-O-methyl modified nucleotide with phosphorothioate linkage
  modified_base 100: mod_base = OTHER; note = 2'-O-methyl modified nucleotide

SEQ ID NO: 381 - RNA, 42 nt, synthetic construct
  misc_feature 1..42: note = Description of Artificial Sequence: Synthetic oligonucleotide
  source 1..42: mol_type = other RNA
tgcggtggggagatatgtaggttttagagctatgctgttttg

SEQ ID NO: 382 - RNA, 42 nt, synthetic construct; identical to SEQ ID NO: 381
  misc_feature 1..42: note = Description of Artificial Sequence: Synthetic oligonucleotide
  source 1..42: mol_type = other RNA
  modified_base 1: mod_base = OTHER; note = 2'-O-methyl modified nucleotide with phosphorothioate linkage
  modified_base 2: mod_base = OTHER; note = 2'-O-methyl modified nucleotide with phosphorothioate linkage
  modified_base 3: mod_base = OTHER; note = 2'-O-methyl modified nucleotide with phosphorothioate linkage
  modified_base 39: mod_base = OTHER; note = nucleotide with phosphorothioate linkage
  modified_base 40: mod_base = OTHER; note = 2'-O-methyl modified nucleotide with phosphorothioate linkage
  modified_base 41: mod_base = OTHER; note = 2'-O-methyl modified nucleotide with phosphorothioate linkage
  modified_base 42: mod_base = OTHER; note = 2'-O-methyl modified nucleotide

SEQ ID NO: 383 - RNA, 100 nt, synthetic construct
  misc_feature 1..100: note = Description of Artificial Sequence: Synthetic polynucleotide
  source 1..100: mol_type = other RNA
gaaacaatgaggacctgactgttttagagctagaaatagcaagttaaaataaggctagtccgttatcaacttgaaaaagtggcaccgagtcggtgctttt

SEQ ID NO: 384 - RNA, 100 nt, synthetic construct; identical to SEQ ID NO: 383
  misc_feature 1..100: note = Description of Artificial Sequence: Synthetic polynucleotide
  source 1..100: mol_type = other RNA
  modified_base 1: mod_base = OTHER; note = 2'-O-methyl modified nucleotide with phosphorothioate linkage
  modified_base 2: mod_base = OTHER; note = 2'-O-methyl modified nucleotide with phosphorothioate linkage
  modified_base 3: mod_base = OTHER; note = 2'-O-methyl modified nucleotide with phosphorothioate linkage
  modified_base 97: mod_base = OTHER; note = nucleotide with phosphorothioate linkage
  modified_base 98: mod_base = OTHER; note = 2'-O-methyl modified nucleotide with phosphorothioate linkage
  modified_base 99: mod_base = OTHER; note = 2'-O-methyl modified nucleotide with phosphorothioate linkage
  modified_base 100: mod_base = OTHER; note = 2'-O-methyl modified nucleotide

SEQ ID NO: 385 - RNA, 42 nt, synthetic construct
  misc_feature 1..42: note = Description of Artificial Sequence: Synthetic oligonucleotide
  source 1..42: mol_type = other RNA
gaaacaatgaggacctgactgttttagagctatgctgttttg

SEQ ID NO: 386 - RNA, 42 nt, synthetic construct; identical to SEQ ID NO: 385
  misc_feature 1..42: note = Description of Artificial Sequence: Synthetic oligonucleotide
  source 1..42: mol_type = other RNA
  modified_base 1: mod_base = OTHER; note = 2'-O-methyl modified nucleotide with phosphorothioate linkage
  modified_base 2: mod_base = OTHER; note = 2'-O-methyl modified nucleotide with phosphorothioate linkage
  modified_base 3: mod_base = OTHER; note = 2'-O-methyl modified nucleotide with phosphorothioate linkage
  modified_base 39: mod_base = OTHER; note = nucleotide with phosphorothioate linkage
  modified_base 40: mod_base = OTHER; note = 2'-O-methyl modified nucleotide with phosphorothioate linkage
  modified_base 41: mod_base = OTHER; note = 2'-O-methyl modified nucleotide with phosphorothioate linkage
  modified_base 42: mod_base = OTHER; note = 2'-O-methyl modified nucleotide

SEQ ID NO: 387 - RNA, 100 nt, synthetic construct
  misc_feature 1..100: note = Description of Artificial Sequence: Synthetic polynucleotide
  source 1..100: mol_type = other RNA
gtaagcatttaagtggctacgttttagagctagaaatagcaagttaaaataaggctagtccgttatcaacttgaaaaagtggcaccgagtcggtgctttt

SEQ ID NO: 388 - RNA, 100 nt, synthetic construct; identical to SEQ ID NO: 387
  misc_feature 1..100: note = Description of Artificial Sequence: Synthetic polynucleotide
  source 1..100: mol_type = other RNA
  modified_base 1: mod_base = OTHER; note = 2'-O-methyl modified nucleotide with phosphorothioate linkage
  modified_base 2: mod_base = OTHER; note = 2'-O-methyl modified nucleotide with phosphorothioate linkage
  modified_base 3: mod_base = OTHER; note = 2'-O-methyl modified nucleotide with phosphorothioate linkage
  modified_base 97: mod_base = OTHER; note = nucleotide with phosphorothioate linkage
  modified_base 98: mod_base = OTHER; note = 2'-O-methyl modified nucleotide with phosphorothioate linkage
  modified_base 99: mod_base = OTHER; note = 2'-O-methyl modified nucleotide with phosphorothioate linkage
  modified_base 100: mod_base = OTHER; note = 2'-O-methyl modified nucleotide

SEQ ID NO: 389 - RNA, 42 nt, synthetic construct
  misc_feature 1..42: note = Description of Artificial Sequence: Synthetic oligonucleotide
  source 1..42: mol_type = other RNA
gtaagcatttaagtggctacgttttagagctatgctgttttg

SEQ ID NO: 390 - RNA, 42 nt, synthetic construct; identical to SEQ ID NO: 389
  misc_feature 1..42: note = Description of Artificial Sequence: Synthetic oligonucleotide
  source 1..42: mol_type = other RNA
  modified_base 1: mod_base = OTHER; note = 2'-O-methyl modified nucleotide with phosphorothioate linkage
  modified_base 2: mod_base = OTHER; note = 2'-O-methyl modified nucleotide with phosphorothioate linkage
  modified_base 3: mod_base = OTHER; note = 2'-O-methyl modified nucleotide with phosphorothioate linkage
  modified_base 39: mod_base = OTHER; note = nucleotide with phosphorothioate linkage
  modified_base 40: mod_base = OTHER; note = 2'-O-methyl modified nucleotide with phosphorothioate linkage
  modified_base 41: mod_base = OTHER; note = 2'-O-methyl modified nucleotide with phosphorothioate linkage
  modified_base 42: mod_base = OTHER; note = 2'-O-methyl modified nucleotide

SEQ ID NO: 391 - RNA, 100 nt, synthetic construct
  misc_feature 1..100: note = Description of Artificial Sequence: Synthetic polynucleotide
  source 1..100: mol_type = other RNA
aggcacctcagactcagcatgttttagagctagaaatagcaagttaaaataaggctagtccgttatcaacttgaaaaagtggcaccgagtcggtgctttt

SEQ ID NO: 392 - RNA, 100 nt, synthetic construct; identical to SEQ ID NO: 391
  misc_feature 1..100: note = Description of Artificial Sequence: Synthetic polynucleotide
  source 1..100: mol_type = other RNA
  modified_base 1: mod_base = OTHER; note = 2'-O-methyl modified nucleotide with phosphorothioate linkage
  modified_base 2: mod_base = OTHER; note = 2'-O-methyl modified nucleotide with phosphorothioate linkage
  modified_base 3: mod_base = OTHER; note = 2'-O-methyl modified nucleotide with phosphorothioate linkage
  modified_base 97: mod_base = OTHER; note = nucleotide with phosphorothioate linkage
  modified_base 98: mod_base = OTHER; note = 2'-O-methyl modified nucleotide with phosphorothioate linkage
  modified_base 99: mod_base = OTHER; note = 2'-O-methyl modified nucleotide with phosphorothioate linkage
  modified_base 100: mod_base = OTHER; note = 2'-O-methyl modified nucleotide

SEQ ID NO: 393 - RNA, 42 nt, synthetic construct
  misc_feature 1..42: note = Description of Artificial Sequence: Synthetic oligonucleotide
  source 1..42: mol_type = other RNA
aggcacctcagactcagcatgttttagagctatgctgttttg

SEQ ID NO: 394 - RNA, 42 nt, synthetic construct; identical to SEQ ID NO: 393
  misc_feature 1..42: note = Description of Artificial Sequence: Synthetic oligonucleotide
  source 1..42: mol_type = other RNA
  modified_base 1: mod_base = OTHER; note = 2'-O-methyl modified nucleotide with phosphorothioate linkage
  modified_base 2: mod_base = OTHER; note = 2'-O-methyl modified nucleotide with phosphorothioate linkage
  modified_base 3: mod_base = OTHER; note = 2'-O-methyl modified nucleotide with phosphorothioate linkage
  modified_base 39: mod_base = OTHER; note = nucleotide with phosphorothioate linkage
  modified_base 40: mod_base = OTHER; note = 2'-O-methyl modified nucleotide with phosphorothioate linkage
  modified_base 41: mod_base = OTHER; note = 2'-O-methyl modified nucleotide with phosphorothioate linkage
  modified_base 42: mod_base = OTHER; note = 2'-O-methyl modified nucleotide

SEQ ID NO: 395 - RNA, 100 nt, synthetic construct
  misc_feature 1..100: note = Description of Artificial Sequence: Synthetic polynucleotide
  source 1..100: mol_type = other RNA
atggtatgggaggtatactagttttagagctagaaatagcaagttaaaataaggctagtccgttatcaacttgaaaaagtggcaccgagtcggtgctttt

SEQ ID NO: 396 - RNA, 100 nt, synthetic construct; identical to SEQ ID NO: 395
  misc_feature 1..100: note = Description of Artificial Sequence: Synthetic polynucleotide
  source 1..100: mol_type = other RNA
  modified_base 1: mod_base = OTHER; note = 2'-O-methyl modified nucleotide with phosphorothioate linkage
  modified_base 2: mod_base = OTHER; note = 2'-O-methyl modified nucleotide with phosphorothioate linkage
  modified_base 3: mod_base = OTHER; note = 2'-O-methyl modified nucleotide with phosphorothioate linkage
  modified_base 97: mod_base = OTHER; note = nucleotide with phosphorothioate linkage
  modified_base 98: mod_base = OTHER; note = 2'-O-methyl modified nucleotide with phosphorothioate linkage
  modified_base 99: mod_base = OTHER; note = 2'-O-methyl modified nucleotide with phosphorothioate linkage
  modified_base 100: mod_base = OTHER; note = 2'-O-methyl modified nucleotide

SEQ ID NO: 397 - RNA, 42 nt, synthetic construct
  misc_feature 1..42: note = Description of Artificial Sequence: Synthetic oligonucleotide
  source 1..42: mol_type = other RNA
atggtatgggaggtatactagttttagagctatgctgttttg

SEQ ID NO: 398 - RNA, 42 nt, synthetic construct; identical to SEQ ID NO: 397
  misc_feature 1..42: note = Description of Artificial Sequence: Synthetic oligonucleotide
  source 1..42: mol_type = other RNA
  modified_base 1: mod_base = OTHER; note = 2'-O-methyl modified nucleotide with phosphorothioate linkage
  modified_base 2: mod_base = OTHER; note = 2'-O-methyl modified nucleotide with phosphorothioate linkage
  modified_base 3: mod_base = OTHER; note = 2'-O-methyl modified nucleotide with phosphorothioate linkage
  modified_base 39: mod_base = OTHER; note = nucleotide with phosphorothioate linkage
  modified_base 40: mod_base = OTHER; note = 2'-O-methyl modified nucleotide with phosphorothioate linkage
  modified_base 41: mod_base = OTHER; note = 2'-O-methyl modified nucleotide with phosphorothioate linkage
  modified_base 42: mod_base = OTHER; note = 2'-O-methyl modified nucleotide

SEQ ID NO: 399 - skipped

SEQ ID NO: 400 - RNA, 25 nt, synthetic construct
  misc_feature 1..25: note = Description of Artificial Sequence: Synthetic oligonucleotide
  source 1..25: mol_type = other RNA
cagtcattatttattatgaataagc

SEQ ID NO: 401 - RNA, 25 nt, synthetic construct
  misc_feature 1..25: note = Description of Artificial Sequence: Synthetic oligonucleotide
  source 1..25: mol_type = other RNA
ggaaataattcacatgccaattatt

SEQ ID NO: 402 - RNA, 25 nt, synthetic construct
  misc_feature 1..25: note = Description of Artificial Sequence: Synthetic oligonucleotide
  source 1..25: mol_type = other RNA
tatttggctatcttttcactaagct

SEQ ID NO: 403 - RNA, 25 nt, synthetic construct
  misc_feature 1..25: note = Description of Artificial Sequence: Synthetic oligonucleotide
  source 1..25: mol_type = other RNA
cactaagctaggtaatctagccaga

SEQ ID NO: 404 - RNA, 25 nt, synthetic construct
  misc_feature 1..25: note = Description of Artificial Sequence: Synthetic oligonucleotide
  source 1..25: mol_type = other RNA
taagctaggtaatctagccagaagg

SEQ ID NO: 405 - RNA, 25 nt, synthetic construct
  misc_feature 1..25: note = Description of Artificial Sequence: Synthetic oligonucleotide
  source 1..25: mol_type = other RNA
taggtaatctagccagaaggtggat

SEQ ID NO: 406 - RNA, 25 nt, synthetic construct
  misc_feature 1..25: note = Description of Artificial Sequence: Synthetic oligonucleotide
  source 1..25: mol_type = other RNA
taatctagccagaaggtggataggt

SEQ ID NO: 407 - RNA, 25 nt, synthetic construct
  misc_feature 1..25: note = Description of Artificial Sequence: Synthetic oligonucleotide
  source 1..25: mol_type = other RNA
tggataggtaggattttccccactt

SEQ ID NO: 408 - RNA, 25 nt, synthetic construct
  misc_feature 1..25: note = Description of Artificial Sequence: Synthetic oligonucleotide
  source 1..25: mol_type = other RNA
gtaggattttccccacttaggttca

SEQ ID NO: 409 - RNA, 25 nt, synthetic construct
  misc_feature 1..25: note = Description of Artificial Sequence: Synthetic oligonucleotide
  source 1..25: mol_type = other RNA
gcctgtatgtgaatctacagcacac

SEQ ID NO: 410 - RNA, 25 nt, synthetic construct
  misc_feature 1..25: note = Description of Artificial Sequence: Synthetic oligonucleotide
  source 1..25: mol_type = other RNA
tgctatgttgtttctaattctcttc

SEQ ID NO: 411 - RNA, 25 nt, synthetic construct
  misc_feature 1..25: note = Description of Artificial Sequence: Synthetic oligonucleotide
  source 1..25: mol_type = other RNA
tgagaaaagttctgtgcaaattaac

SEQ ID NO: 412 - RNA, 25 nt, synthetic construct
  misc_feature 1..25: note = Description of Artificial Sequence: Synthetic oligonucleotide
  source 1..25: mol_type = other RNA
gagaaaagttctgtgcaaattaact

SEQ ID NO: 413 - RNA, 25 nt, synthetic construct
  misc_feature 1..25: note = Description of Artificial Sequence: Synthetic oligonucleotide
  source 1..25: mol_type = other RNA
cctgtttgtagatgtaacttatttg

SEQ ID NO: 414 - RNA, 25 nt, synthetic construct
  misc_feature 1..25: note = Description of Artificial Sequence: Synthetic oligonucleotide
  source 1..25: mol_type = other RNA
aacttatttgtggcactaatttcta

SEQ ID NO: 415 - RNA, 25 nt, synthetic construct
  misc_feature 1..25: note = Description of Artificial Sequence: Synthetic oligonucleotide
  source 1..25: mol_type = other RNA
gtctgcattaagatatatttcctga

SEQ ID NO: 416 - RNA, 25 nt, synthetic construct
  misc_feature 1..25: note = Description of Artificial Sequence: Synthetic oligonucleotide
  source 1..25: mol_type = other RNA
cattaagatatatttcctgaaggtt

SEQ ID NO: 417 - RNA, 25 nt, synthetic construct
  misc_feature 1..25: note = Description of Artificial Sequence: Synthetic oligonucleotide
  source 1..25: mol_type = other RNA
attaagatatatttcctgaaggttt

SEQ ID NO: 418 - RNA, 25 nt, synthetic construct
  misc_feature 1..25: note = Description of Artificial Sequence: Synthetic oligonucleotide
  source 1..25: mol_type = other RNA
actactgacatttatcaccttcttt

SEQ ID NO: 419 - RNA, 25 nt, synthetic construct
  misc_feature 1..25: note = Description of Artificial Sequence: Synthetic oligonucleotide
  source 1..25: mol_type = other RNA
ttaaaagacaaattcaaatcctgca

SEQ ID NO: 420 - RNA, 25 nt, synthetic construct
  misc_feature 1..25: note = Description of Artificial Sequence: Synthetic oligonucleotide
  source 1..25: mol_type = other RNA
caccaaaagcatatatttgaaaaac

SEQ ID NO: 421 - RNA, 25 nt, synthetic construct
  misc_feature 1..25: note = Description of Artificial Sequence: Synthetic oligonucleotide
  source 1..25: mol_type = other RNA
aagcatatatttgaaaaacaggatt

SEQ ID NO: 422 - RNA, 25 nt, synthetic construct
  misc_feature 1..25: note = Description of Artificial Sequence: Synthetic oligonucleotide
  source 1..25: mol_type = other RNA
gcgtgccatattatgcattatttaa

SEQ ID NO: 423 - RNA, 25 nt, synthetic construct
  misc_feature 1..25: note = Description of Artificial Sequence: Synthetic oligonucleotide
  source 1..25: mol_type = other RNA
tatgcaaattataagtcagacagtt

SEQ ID NO: 424 - RNA, 25 nt, synthetic construct
  misc_feature 1..25: note = Description of Artificial Sequence: Synthetic oligonucleotide
  source 1..25: mol_type = other RNA
ttgaaaatttatgccatctgataag

SEQ ID NO: 425 - RNA, 25 nt, synthetic construct
  misc_feature 1..25: note = Description of Artificial Sequence: Synthetic oligonucleotide
  source 1..25: mol_type = other RNA
aaatctgttcctcctacccacccga

SEQ ID NO: 426 - RNA, 25 nt, synthetic construct
  misc_feature 1..25: note = Description of Artificial Sequence: Synthetic oligonucleotide
  source 1..25: mol_type = other RNA
aatctgttcctcctacccacccgat

SEQ ID NO: 427 - RNA, 25 nt, synthetic construct
  misc_feature 1..25: note = Description of Artificial Sequence: Synthetic oligonucleotide
  source 1..25: mol_type = other RNA
tcctacccacccgatgggtgtctgt

SEQ ID NO: 428 - RNA, 25 nt, synthetic construct
  misc_feature 1..25: note = Description of Artificial Sequence: Synthetic oligonucleotide
  source 1..25: mol_type = other RNA
cacccgatgggtgtctgtaggaaac

SEQ ID NO: 429 - RNA, 25 nt, synthetic construct
  misc_feature 1..25: note = Description of Artificial Sequence: Synthetic oligonucleotide
  source 1..25: mol_type = other RNA
agacaacatagaatgtatagaaaca

SEQ ID NO: 430 - RNA, 25 nt, synthetic construct
  misc_feature 1..25: note = Description of Artificial Sequence: Synthetic oligonucleotide
  source 1..25: mol_type = other RNA
gacaacatagaatgtatagaaacaa

SEQ ID NO: 431 - RNA, 25 nt, synthetic construct
  misc_feature 1..25: note = Description of Artificial Sequence: Synthetic oligonucleotide
  source 1..25: mol_type = other RNA
acaacatagaatgtatagaaacaag

SEQ ID NO: 432 - RNA, 25 nt, synthetic construct
  misc_feature 1..25: note = Description of Artificial Sequence: Synthetic oligonucleotide
  source 1..25: mol_type = other RNA
catagaatgtatagaaacaaggggt

SEQ ID NO: 433 - RNA, 25 nt, synthetic construct
  misc_feature 1..25: note = Description of Artificial Sequence: Synthetic oligonucleotide
  source 1..25: mol_type = other RNA
atagaatgtatagaaacaaggggtt

SEQ ID NO: 434 - RNA, 25 nt, synthetic construct
  misc_feature 1..25: note = Description of Artificial Sequence: Synthetic oligonucleotide
  source 1..25: mol_type = other RNA
tagaatgtatagaaacaaggggttg

SEQ ID NO: 435 - RNA, 25 nt, synthetic construct
  misc_feature 1..25: note = Description of Artificial Sequence: Synthetic oligonucleotide
  source 1..25: mol_type = other RNA
ggactcatgcgcatttccacaatac

SEQ ID NO: 436 - RNA, 25 nt, synthetic construct
  misc_feature 1..25: note = Description of Artificial Sequence: Synthetic oligonucleotide
  source 1..25: mol_type = other RNA
gcgcatttccacaatacaggtaatt

SEQ ID NO: 437 - RNA, 25 nt, synthetic construct
  misc_feature 1..25: note = Description of Artificial Sequence: Synthetic oligonucleotide
  source 1..25: mol_type = other RNA
atttccacaatacaggtaattaggt

SEQ ID NO: 438 - RNA, 25 nt, synthetic construct
  misc_feature 1..25: note = Description of Artificial Sequence: Synthetic oligonucleotide
  source 1..25: mol_type = other RNA
ccacaatacaggtaattaggttggc

SEQ ID NO: 439 - RNA, 25 nt, synthetic construct
  misc_feature 1..25: note = Description of Artificial Sequence: Synthetic oligonucleotide
  source 1..25: mol_type = other RNA
ggtaattaggttggctggtttcaga

SEQ ID NO: 440 - RNA, 25 nt, synthetic construct
  misc_feature 1..25: note = Description of Artificial Sequence: Synthetic oligonucleotide
  source 1..25: mol_type = other RNA
gtaattaggttggctggtttcagaa

SEQ ID NO: 441 - RNA, 25 nt, synthetic construct
  misc_feature 1..25: note = Description of Artificial Sequence: Synthetic oligonucleotide
  source 1..25: mol_type = other RNA
taggttggctggtttcagaagggcc

SEQ ID NO: 442 - RNA, 25 nt, synthetic construct
  misc_feature 1..25: note = Description of Artificial Sequence: Synthetic oligonucleotide
  source 1..25: mol_type = other RNA
aggttggctggtttcagaagggcca

SEQ ID NO: 443 - RNA, 25 nt, synthetic construct
  misc_feature 1..25: note = Description of Artificial Sequence: Synthetic oligonucleotide
  source 1..25: mol_type = other RNA
gccagggcatcactcatgacagcga

SEQ ID NO: 444 - RNA, 25 nt, synthetic construct
  misc_feature 1..25: note = Description of Artificial Sequence: Synthetic oligonucleotide
  source 1..25: mol_type = other RNA
catcactcatgacagcgatggtcca

SEQ ID NO: 445 - RNA, 25 nt, synthetic construct
  misc_feature 1..25: note = Description of Artificial Sequence: Synthetic oligonucleotide
  source 1..25: mol_type = other RNA
atcactcatgacagcgatggtccac

SEQ ID NO: 446 - RNA, 25 nt, synthetic construct
  misc_feature 1..25: note = Description of Artificial Sequence: Synthetic oligonucleotide
  source 1..25: mol_type = other RNA
agcgatggtccacgggccctctcta

SEQ ID NO: 447 - RNA, 25 nt, synthetic construct
  misc_feature 1..25: note = Description of Artificial Sequence: Synthetic oligonucleotide
  source 1..25: mol_type = other RNA
gcgatggtccacgggccctctctat

SEQ ID NO: 448 - RNA, 25 nt, synthetic construct
  misc_feature 1..25: note = Description of Artificial Sequence: Synthetic oligonucleotide
  source 1..25: mol_type = other RNA
atgggactgattcactgttccaatg

SEQ ID NO: 449 - RNA, 25 nt, synthetic construct
  misc_feature 1..25: note = Description of Artificial Sequence: Synthetic oligonucleotide
  source 1..25: mol_type = other RNA
tgggactgattcactgttccaatgt

SEQ ID NO: 450 - RNA, 25 nt, synthetic construct
  misc_feature 1..25: note = Description of Artificial Sequence: Synthetic oligonucleotide
  source 1..25: mol_type = other RNA
tttttattaaaaaatataaataaaa

SEQ ID NO: 451 - RNA, 25 nt, synthetic construct
  misc_feature 1..25: note = Description of Artificial Sequence: Synthetic oligonucleotide
  source 1..25: mol_type = other RNA
aaaaatataaataaaatggcgctgc

SEQ ID NO: 452 - RNA, 25 nt, synthetic construct
  misc_feature 1..25: note = Description of Artificial Sequence: Synthetic oligonucleotide
  source 1..25: mol_type = other RNA
ataaataaaatggcgctgcaggcct

SEQ ID NO: 453 - RNA, 25 nt, synthetic construct
  misc_feature 1..25: note = Description of Artificial Sequence: Synthetic oligonucleotide
  source 1..25: mol_type = other RNA
ataaaatggcgctgcaggcctaggc

SEQ ID NO: 454 - RNA, 25 nt, synthetic construct
  misc_feature 1..25: note = Description of Artificial Sequence: Synthetic oligonucleotide
  source 1..25: mol_type = other RNA
aatggcgctgcaggcctaggctgga

SEQ ID NO: 455 - RNA, 25 nt, synthetic construct
  misc_feature 1..25: note = Description of Artificial Sequence: Synthetic oligonucleotide
  source 1..25: mol_type = other RNA
caggcctaggctggaaggactctgc

SEQ ID NO: 456 - RNA, 25 nt, synthetic construct
  misc_feature 1..25: note = Description of Artificial Sequence: Synthetic oligonucleotide
  source 1..25: mol_type = other RNA
tctgcaggactctgtcttcgcacaa

SEQ ID NO: 457 - RNA, 25 nt, synthetic construct
  misc_feature 1..25: note = Description of Artificial Sequence: Synthetic oligonucleotide
  source 1..25: mol_type = other RNA
actctgtcttcgcacaacggcttct

SEQ ID NO: 458 - RNA, 25 nt, synthetic construct
  misc_feature 1..25: note = Description of Artificial Sequence: Synthetic oligonucleotide
  source 1..25: mol_type = other RNA
ctgtcttcgcacaacggcttcttgg

SEQ ID NO: 459 - RNA, 25 nt, synthetic construct
  misc_feature 1..25: note = Description of Artificial Sequence: Synthetic oligonucleotide
  source 1..25: mol_type = other RNA
ctgtcagaaaacatcacaaactagc

SEQ ID NO: 460 - RNA, 25 nt, synthetic construct
  misc_feature 1..25: note = Description of Artificial Sequence: Synthetic oligonucleotide
  source 1..25: mol_type = other RNA
gatgacagaccacgctgacgtcgac

SEQ ID NO: 461 - RNA, 25 nt, synthetic construct
  misc_feature 1..25: note = Description of Artificial Sequence: Synthetic oligonucleotide
  source 1..25: mol_type = other RNA
atgacagaccacgctgacgtcgact

SEQ ID NO: 462 - RNA, 25 nt, synthetic construct
  misc_feature 1..25: note = Description of Artificial Sequence: Synthetic oligonucleotide
  source 1..25: mol_type = other RNA
acagaccacgctgacgtcgactggg

SEQ ID NO: 463 - RNA, 25 nt, synthetic construct
  misc_feature 1..25: note = Description of Artificial Sequence: Synthetic oligonucleotide
  source 1..25: mol_type = other RNA
gggcggcacgcgtccaccccacccc

SEQ ID NO: 464 - RNA, 25 nt, synthetic construct
  misc_feature 1..25: note = Description of Artificial Sequence: Synthetic oligonucleotide
  source 1..25: mol_type = other RNA
ggcggcacgcgtccaccccacccct

SEQ ID NO: 465 - RNA, 25 nt, synthetic construct
  misc_feature 1..25: note = Description of Artificial Sequence: Synthetic oligonucleotide
  source 1..25: mol_type = other RNA
gcggcacgcgtccaccccacccctg

SEQ ID NO: 466 - RNA, 25 nt, synthetic construct
  misc_feature 1..25: note = Description of Artificial Sequence: Synthetic oligonucleotide
  source 1..25: mol_type = other RNA
cggcacgcgtccaccccacccctgg

SEQ ID NO: 467 - RNA, 25 nt, synthetic construct
  misc_feature 1..25: note = Description of Artificial Sequence: Synthetic oligonucleotide
  source 1..25: mol_type = other RNA
gggcttcaaattttctcagaactta

SEQ ID NO: 468 - RNA, 25 nt, synthetic construct
  misc_feature 1..25: note = Description of Artificial Sequence: Synthetic oligonucleotide
  source 1..25: mol_type = other RNA
ggcttcaaattttctcagaacttaa

SEQ ID NO: 469 - RNA, 25 nt, synthetic construct
  misc_feature 1..25: note = Description of Artificial Sequence: Synthetic oligonucleotide
  source 1..25: mol_type = other RNA
aaactgccacacatcttgagctctc

SEQ ID NO: 470 - RNA, 25 nt, synthetic construct
  misc_feature 1..25: note = Description of Artificial Sequence: Synthetic oligonucleotide
  source 1..25: mol_type = other RNA
aactgccacacatcttgagctctct

SEQ ID NO: 471 - RNA, 25 nt, synthetic construct
  misc_feature 1..25: note = Description of Artificial Sequence: Synthetic oligonucleotide
  source 1..25: mol_type = other RNA
tgagctctctgggtactacgccgaa

SEQ ID NO: 472 - RNA, 25 nt, synthetic construct
  misc_feature 1..25: note = Description of Artificial Sequence: Synthetic oligonucleotide
  source 1..25: mol_type = other RNA
gagctctctgggtactacgccgaat

SEQ ID NO: 473 - RNA, 25 nt, synthetic construct
  misc_feature 1..25: note = Description of Artificial Sequence: Synthetic oligonucleotide
  source 1..25: mol_type = other RNA
agctctctgggtactacgccgaatg

SEQ ID NO: 474 - RNA, 25 nt, synthetic construct
  misc_feature 1..25: note = Description of Artificial Sequence: Synthetic oligonucleotide
  source 1..25: mol_type = other RNA
gctctctgggtactacgccgaatgg

SEQ ID NO: 475 - RNA, 25 nt, synthetic construct
  misc_feature 1..25: note = Description of Artificial Sequence: Synthetic oligonucleotide
  source 1..25: mol_type = other RNA
gggggtgtgtgaagaacctagaaag

SEQ ID NO: 476 - RNA, 25 nt, synthetic construct
  misc_feature 1..25: note = Description of Artificial Sequence: Synthetic oligonucleotide
  source 1..25: mol_type = other RNA
gtgtgtgaagaacctagaaagaggt

SEQ ID NO: 477 - RNA, 25 nt, synthetic construct
  misc_feature 1..25: note = Description of Artificial Sequence: Synthetic oligonucleotide
  source 1..25: mol_type = other RNA
gaacctagaaagaggttggagacag

SEQ ID NO: 478 - RNA, 25 nt, synthetic construct
  misc_feature 1..25: note = Description of Artificial Sequence: Synthetic oligonucleotide
  source 1..25: mol_type = other RNA
cttagtgaaaagatagccaaataat

SEQ ID NO: 479 - RNA, 25 nt, synthetic construct
  misc_feature 1..25: note = Description of Artificial Sequence: Synthetic oligonucleotide
  source 1..25: mol_type = other RNA
gggaaaatcctacctatccaccttc

SEQ ID NO: 480 - RNA, 25 nt, synthetic construct
  misc_feature 1..25: note = Description of Artificial Sequence: Synthetic oligonucleotide
  source 1..25: mol_type = other RNA
cacatacaggccgtgaacctaagtg

SEQ ID NO: 481 - RNA, 25 nt, synthetic construct
  misc_feature 1..25: note = Description of Artificial Sequence: Synthetic oligonucleotide
  source 1..25: mol_type = other RNA
tcacatacaggccgtgaacctaagt

SEQ ID NO: 482 - RNA, 25 nt, synthetic construct
  misc_feature 1..25: note = Description of Artificial Sequence: Synthetic oligonucleotide
  source 1..25: mol_type = other RNA
ttcacatacaggccgtgaacctaag

SEQ ID NO: 483 - RNA, 25 nt, synthetic construct
  misc_feature 1..25: note = Description of Artificial Sequence: Synthetic oligonucleotide
  source 1..25: mol_type = other RNA
acctgtgtgctgtagattcacatac

SEQ ID NO: 484 - RNA, 25 nt, synthetic construct
  misc_feature 1..25: note = Description of Artificial Sequence: Synthetic oligonucleotide
  source 1..25: mol_type = other RNA
tagaaacaacatagcaaattaaaat

SEQ ID NO: 485 - RNA, 25 nt, synthetic construct
  misc_feature 1..25: note = Description of Artificial Sequence: Synthetic oligonucleotide
  source 1..25: mol_type = other RNA
tctcagtttggtattttttactgct

SEQ ID NO: 486 - RNA, 25 nt, synthetic construct
  misc_feature 1..25: note = Description of Artificial Sequence: Synthetic oligonucleotide
  source 1..25: mol_type = other RNA
aatttgcacagaacttttctcagtt

SEQ ID NO: 487 - RNA, 25 nt, synthetic construct
  misc_feature 1..25: note = Description of Artificial Sequence: Synthetic oligonucleotide
  source 1..25: mol_type = other RNA
acaaacaggtggtaaaaattctttc

SEQ ID NO: 488 - RNA, 25 nt, synthetic construct
  misc_feature 1..25: note = Description of Artificial Sequence: Synthetic oligonucleotide
  source 1..25: mol_type = other RNA
caaataagttacatctacaaacagg

SEQ ID NO: 489 - RNA, 25 nt, synthetic construct
  misc_feature 1..25: note = Description of Artificial Sequence: Synthetic oligonucleotide
  source 1..25: mol_type = other RNA
ccacaaataagttacatctacaaac

SEQ ID NO: 490 - RNA, 25 nt, synthetic construct
  misc_feature 1..25: note = Description of Artificial Sequence: Synthetic oligonucleotide
  source 1..25: mol_type = other RNA
gattttagaggggggaaattatagg

SEQ ID NO: 491 - RNA, 25 nt, synthetic construct
  misc_feature 1..25: note = Description of Artificial Sequence: Synthetic oligonucleotide
  source 1..25: mol_type = other RNA
gcagattttagaggggggaaattat

SEQ ID NO: 492 - RNA, 25 nt, synthetic construct
  misc_feature 1..25: note = Description of Artificial Sequence: Synthetic oligonucleotide
  source 1..25: mol_type = other RNA
gaaatttggggcagattttagaggg

SEQ ID NO: 493 - RNA, 25 nt, synthetic construct
  misc_feature 1..25: note = Description of Artificial Sequence: Synthetic oligonucleotide
  source 1..25: mol_type = other RNA
ggaaatttggggcagattttagagg

SEQ ID NO: 494 - RNA, 25 nt, synthetic construct
  misc_feature 1..25: note = Description of Artificial Sequence: Synthetic oligonucleotide
  source 1..25: mol_type = other RNA
aggaaatttggggcagattttagag

SEQ ID NO: 495 - RNA, 25 nt, synthetic construct
  misc_feature 1..25: note = Description of Artificial Sequence: Synthetic oligonucleotide
  source 1..25: mol_type = other RNA
caggaaatttggggcagattttaga

SEQ ID NO: 496 - RNA, 25 nt, synthetic construct
  misc_feature 1..25: note = Description of Artificial Sequence: Synthetic oligonucleotide
  source 1..25: mol_type = other RNA
tcaggaaatttggggcagattttag

SEQ ID NO: 497 - RNA, 25 nt, synthetic construct
  misc_feature 1..25: note = Description of Artificial Sequence: Synthetic oligonucleotide
  source 1..25: mol_type = other RNA
tttagtacttacatcaggaaatttg

SEQ ID NO: 498 - RNA, 25 nt, synthetic construct
  misc_feature 1..25: note = Description of Artificial Sequence: Synthetic oligonucleotide
  source 1..25: mol_type = other RNA
ctttagtacttacatcaggaaattt

SEQ ID NO: 499 - RNA, 25 nt, synthetic construct
  misc_feature 1..25: note = Description of Artificial Sequence: Synthetic oligonucleotide
  source 1..25: mol_type = other RNA
tctttagtacttacatcaggaaatt

SEQ ID NO: 500 - RNA, 25 nt, synthetic construct
  misc_feature 1..25: note = Description of Artificial Sequence: Synthetic oligonucleotide
  source 1..25: mol_type = other RNA
ataaaacttctttagtacttacatc

SEQ ID NO: 501 - RNA, 25 nt, synthetic construct
  misc_feature 1..25: note = Description of Artificial Sequence: Synthetic oligonucleotide
  source 1..25: mol_type = other RNA
tctaattttaggttcccaaaccttc

SEQ ID NO: 502 - RNA, 25 nt, synthetic construct
  misc_feature 1..25: note = Description of Artificial Sequence: Synthetic oligonucleotide
  source 1..25: mol_type = other RNA
gtttcttattaaatattctaatttt

SEQ ID NO: 503 - RNA, 25 nt, synthetic construct
  misc_feature 1..25: note = Description of Artificial Sequence: Synthetic oligonucleotide
  source 1..25: mol_type = other RNA
ctgggcgagcggtaaatcctaaaga

SEQ ID NO: 504 - RNA, 25 nt, synthetic construct
  misc_feature 1..25: note = Description of Artificial Sequence: Synthetic oligonucleotide
  source 1..25: mol_type = other RNA
ttaggaaagaacatcactgggcgag

SEQ ID NO: 505 - RNA, 25 nt, synthetic construct
  misc_feature 1..25: note = Description of Artificial Sequence: Synthetic oligonucleotide
  source 1..25: mol_type = other RNA
atttagcttaggaaagaacatcact

SEQ ID NO: 506 - RNA, 25 nt, synthetic construct
  misc_feature 1..25: note = Description of Artificial Sequence: Synthetic oligonucleotide
  source 1..25: mol_type = other RNA
aatttagcttaggaaagaacatcac

SEQ ID NO: 507 - RNA, 25 nt, synthetic construct
  misc_feature 1..25: note = Description of Artificial Sequence: Synthetic oligonucleotide
  source 1..25: mol_type = other RNA
ttgaatttgtcttttaatttagctt

SEQ ID NO: 508 - RNA, 25 nt, synthetic construct
  misc_feature 1..25: note = Description of Artificial Sequence: Synthetic oligonucleotide
  source 1..25: mol_type = other RNA
tatatgcttttggtggctaccatgc

SEQ ID NO: 509 - RNA, 25 nt, synthetic construct
  misc_feature 1..25: note = Description of Artificial Sequence: Synthetic oligonucleotide
  source 1..25: mol_type = other RNA
ctgtttttcaaatatatgcttttgg

SEQ ID NO: 510 - RNA, 25 nt, synthetic construct
  misc_feature 1..25: note = Description of Artificial Sequence: Synthetic oligonucleotide
  source 1..25: mol_type = other RNA
atcctgtttttcaaatatatgcttt

SEQ ID NO: 511 - RNA, 25 nt, synthetic construct
  misc_feature 1..25: note = Description of Artificial Sequence: Synthetic oligonucleotide
  source 1..25: mol_type = other RNA
gcataccattaaataatgcataata

SEQ ID NO: 512 - RNA, 25 nt, synthetic construct
  misc_feature 1..25: note = Description of Artificial Sequence: Synthetic oligonucleotide
  source 1..25: mol_type = other RNA
attgctgtttattaatgctgaagtg

SEQ ID NO: 513 - RNA, 25 nt, synthetic construct
  misc_feature 1..25: note = Description of Artificial Sequence: Synthetic oligonucleotide
  source 1..25: mol_type = other RNA
caaggagaatcaaaatgcaaaactt

SEQ ID NO: 514 - RNA, 25 nt, synthetic construct
  misc_feature 1..25: note = Description of Artificial Sequence: Synthetic oligonucleotide
  source 1..25: mol_type = other RNA
tcaaggagaatcaaaatgcaaaact

SEQ ID NO: 515 - RNA, 25 nt, synthetic construct
  misc_feature 1..25: note = Description of Artificial Sequence: Synthetic oligonucleotide
  source 1..25: mol_type = other RNA
gcttatcagatggcataaattttca

SEQ ID NO: 516 - RNA, 25 nt, synthetic construct
  misc_feature 1..25: note = Description of Artificial Sequence: Synthetic oligonucleotide
  source 1..25: mol_type = other RNA
gggaactaggttaccgcttatcaga

SEQ ID NO: 517 - RNA, 25 nt, synthetic construct
  misc_feature 1..25: note = Description of Artificial Sequence: Synthetic oligonucleotide
  source 1..25: mol_type = other RNA
gggcaggagatgtaggaggggaact

SEQ ID NO: 518 - RNA, 25 nt, synthetic construct
  misc_feature 1..25: note = Description of Artificial Sequence: Synthetic oligonucleotide
  source 1..25: mol_type = other RNA
gagaaatgggcaggagatgtaggag

SEQ ID NO: 519 - RNA, 25 nt, synthetic construct
  misc_feature 1..25: note = Description of Artificial Sequence: Synthetic oligonucleotide
  source 1..25: mol_type = other RNA
tgagaaatgggcaggagatgtagga

SEQ ID NO: 520 - RNA, 25 nt, synthetic construct
  misc_feature 1..25: note = Description of Artificial Sequence: Synthetic oligonucleotide
  source 1..25: mol_type = other RNA
ttgagaaatgggcaggagatgtagg

SEQ ID NO: 521 - RNA, 25 nt, synthetic construct
  misc_feature 1..25: note = Description of Artificial Sequence: Synthetic oligonucleotide
  source 1..25: mol_type = other RNA
gatttgagaaatgggcaggagatgt

SEQ ID NO: 522 - RNA, 25 nt, synthetic construct
  misc_feature 1..25: note = Description of Artificial Sequence: Synthetic oligonucleotide
  source 1..25: mol_type = other RNA
ggaggaacagatttgagaaatgggc

SEQ ID NO: 523 - RNA, 25 nt, synthetic construct
  misc_feature 1..25: note = Description of Artificial Sequence: Synthetic oligonucleotide
  source 1..25: mol_type = other RNA
ggtaggaggaacagatttgagaaat

SEQ ID NO: 524 - RNA, 25 nt, synthetic construct
  misc_feature 1..25: note = Description of Artificial Sequence: Synthetic oligonucleotide
  source 1..25: mol_type = other RNA
gggtaggaggaacagatttgagaaa

SEQ ID NO: 525 - RNA, 25 nt, synthetic construct
  misc_feature 1..25: note = Description of Artificial Sequence: Synthetic oligonucleotide
  source 1..25: mol_type = other RNA
tacagacacccatcgggtgggtagg

SEQ ID NO: 526 - RNA, 25 nt, synthetic construct
  misc_feature 1..25: note = Description of Artificial Sequence: Synthetic oligonucleotide
  source 1..25: mol_type = other RNA
tcctacagacacccatcgggtgggt

SEQ ID NO: 527 - RNA, 25 nt, synthetic construct
  misc_feature 1..25: note = Description of Artificial Sequence: Synthetic oligonucleotide
  source 1..25: mol_type = other RNA
tgtttcctacagacacccatcgggt

SEQ ID NO: 528 - RNA, 25 nt, synthetic construct
  misc_feature 1..25: note = Description of Artificial Sequence: Synthetic oligonucleotide
  source 1..25: mol_type = other RNA
ctgtttcctacagacacccatcggg

SEQ ID NO: 529 - RNA, 25 nt, synthetic construct
  misc_feature 1..25: note = Description of Artificial Sequence: Synthetic oligonucleotide
  source 1..25: mol_type = other RNA
tacctgtttcctacagacacccatc

SEQ ID NO: 530 - RNA, 25 nt, synthetic construct
  misc_feature 1..25: note = Description of Artificial Sequence: Synthetic oligonucleotide
  source 1..25: mol_type = other RNA
gtacctgtttcctacagacacccat

SEQ ID NO: 531 - RNA, 25 nt, synthetic construct
  misc_feature 1..25: note = Description of Artificial Sequence: Synthetic oligonucleotide
  source 1..25: mol_type = other RNA
aatttttaatgcttataagacaatg

SEQ ID NO: 532 - RNA, 25 nt, synthetic construct
  misc_feature 1..25: note = Description of Artificial Sequence: Synthetic oligonucleotide
  source 1..25: mol_type = other RNA
acacaataaatgttggagctttagg

SEQ ID NO: 533 - RNA, 25 nt, synthetic construct
  misc_feature 1..25: note = Description of Artificial Sequence: Synthetic oligonucleotide
  source 1..25: mol_type = other RNA
ttgacacaataaatgttggagcttt

SEQ ID NO: 534 - RNA, 25 nt, synthetic construct
  misc_feature 1..25: note = Description of Artificial Sequence: Synthetic oligonucleotide
  source 1..25: mol_type = other RNA
tgcttaacattgacacaataaatgt

SEQ ID NO: 535 - RNA, 25 nt, synthetic construct
  misc_feature 1..25: note = Description of Artificial Sequence: Synthetic oligonucleotide
  source 1..25: mol_type = other RNA
ccagccaacctaattacctgtattg

SEQ ID NO: 536 - RNA, 25 nt, synthetic construct
  misc_feature 1..25: note = Description of Artificial Sequence: Synthetic oligonucleotide
  source 1..25: mol_type = other RNA
accatcgctgtcatgagtgatgccc

SEQ ID NO: 537 - RNA, 25 nt, synthetic construct
  misc_feature 1..25: note = Description of Artificial Sequence: Synthetic oligonucleotide
  source 1..25: mol_type = other RNA
gaatcagtcccatagagagggcccg

SEQ ID NO: 538 - RNA, 25 nt, synthetic construct
  misc_feature 1..25: note = Description of Artificial Sequence: Synthetic oligonucleotide
  source 1..25: mol_type = other RNA
gaacagtgaatcagtcccatagaga

SEQ ID NO: 539 - RNA, 25 nt, synthetic construct
  misc_feature 1..25: note = Description of Artificial Sequence: Synthetic oligonucleotide
  source 1..25: mol_type = other RNA
ggaacagtgaatcagtcccatagag

SEQ ID NO: 540 - RNA, 25 nt, synthetic construct
  misc_feature 1..25: note = Description of Artificial Sequence: Synthetic oligonucleotide
  source 1..25: mol_type = other RNA
taaaaacaaaaaaacagacccacat

SEQ ID NO: 541 - RNA, 25 nt, synthetic construct
  misc_feature 1..25: note = Description of Artificial Sequence: Synthetic oligonucleotide
  source 1..25: mol_type = other RNA
gagtcctgcagagtccttccagcct

SEQ ID NO: 542 - RNA, 25 nt, synthetic construct
  misc_feature 1..25: note = Description of Artificial Sequence: Synthetic oligonucleotide
  source 1..25: mol_type = other RNA
gcgtgccgcccagtcgacgtcagcg

SEQ ID NO: 543 - RNA, 25 nt, synthetic construct
  misc_feature 1..25: note = Description of Artificial Sequence: Synthetic oligonucleotide
  source 1..25: mol_type = other RNA
aaatttgaagcccccaggggtgggg

SEQ ID NO: 544 - RNA, 25 nt, synthetic construct
  misc_feature 1..25: note = Description of Artificial Sequence: Synthetic oligonucleotide
  source 1..25: mol_type = other RNA
agaaaatttgaagcccccaggggtg

SEQ ID NO: 545 - RNA, 25 nt, synthetic construct
  misc_feature 1..25: note = Description of Artificial Sequence: Synthetic oligonucleotide
  source 1..25: mol_type = other RNA
gagaaaatttgaagcccccaggggt

SEQ ID NO: 546 - RNA, 25 nt, synthetic construct
  misc_feature 1..25: note = Description of Artificial Sequence: Synthetic oligonucleotide
  source 1..25: mol_type = other RNA
tgagaaaatttgaagcccccagggg

SEQ ID NO: 547 - RNA, 25 nt, synthetic construct
  misc_feature 1..25: note = Description of Artificial Sequence: Synthetic oligonucleotide
  source 1..25: mol_type = other RNA
ttctgagaaaatttgaagcccccag

SEQ ID NO: 548 - RNA, 25 nt, synthetic construct
  misc_feature 1..25: note = Description of Artificial Sequence: Synthetic oligonucleotide
  source 1..25: mol_type = other RNA
gttctgagaaaatttgaagccccca

SEQ ID NO: 549 - RNA, 25 nt, synthetic construct
  misc_feature 1..25: note = Description of Artificial Sequence: Synthetic oligonucleotide
  source 1..25: mol_type = other RNA
agttctgagaaaatttgaagccccc

SEQ ID NO: 550 - RNA, 25 nt, synthetic construct
  misc_feature 1..25: note = Description of Artificial Sequence: Synthetic oligonucleotide
  source 1..25: mol_type = other RNA
ctcaagatgtgtggcagttttcgga

SEQ ID NO: 551 - RNA, 25 nt, synthetic construct
  misc_feature 1..25: note = Description of Artificial Sequence: Synthetic oligonucleotide
  source 1..25: mol_type = other RNA
agagctcaagatgtgtggcagtttt

SEQ ID NO: 552 - RNA, 25 nt, synthetic construct
  misc_feature 1..25: note = Description of Artificial Sequence: Synthetic oligonucleotide
  source 1..25: mol_type = other RNA
tagtacccagagagctcaagatgtg

SEQ ID NO: 553 - RNA, 25 nt, synthetic construct
  misc_feature 1..25: note = Description of Artificial Sequence: Synthetic oligonucleotide
  source 1..25: mol_type = other RNA
tctaggttcttcacacacccccatt

SEQ ID NO: 554 - RNA, 25 nt, synthetic construct
  misc_feature 1..25: note = Description of Artificial Sequence: Synthetic oligonucleotide
  source 1..25: mol_type = other RNA
ttaattttttttattttttcaataa

SEQ ID NO: 555 - RNA, 25 nt, synthetic construct
  misc_feature 1..25: note = Description of Artificial Sequence: Synthetic oligonucleotide
  source 1..25: mol_type = other RNA
taattttttttattttttcaataaa

SEQ ID NO: 556 - RNA, 25 nt, synthetic construct
  misc_feature 1..25: note = Description of Artificial Sequence: Synthetic oligonucleotide
  source 1..25: mol_type = other RNA
ttattttttcaataaagggacaaaa

SEQ ID NO: 557 - RNA, 25 nt, synthetic construct
  misc_feature 1..25: note = Description of Artificial Sequence: Synthetic oligonucleotide
  source 1..25: mol_type = other RNA
tattttttcaataaagggacaaaat

SEQ ID NO: 558 - RNA, 25 nt, synthetic construct
  misc_feature 1..25: note = Description of Artificial Sequence: Synthetic oligonucleotide
  source 1..25: mol_type = other RNA
aaagggacaaaatgggtgtatgaac

SEQ ID NO: 559 - RNA, 25 nt, synthetic construct
  misc_feature 1..25: note = Description of Artificial Sequence: Synthetic oligonucleotide
  source 1..25: mol_type = other RNA
acaactgccaaaaaaacacagacag

SEQ ID NO: 560 - RNA, 25 nt, synthetic construct
  misc_feature 1..25: note = Description of Artificial Sequence: Synthetic oligonucleotide
  source 1..25: mol_type = other RNA
ccagaaacaaatacaataaaaagcc

SEQ ID NO: 561 - RNA, 25 nt, synthetic construct
  misc_feature 1..25: note = Description of Artificial Sequence: Synthetic oligonucleotide
  source 1..25: mol_type = other RNA
taaaaagccaggttgtaatgacctt

SEQ ID NO: 562 - RNA, 25 nt, synthetic construct
  misc_feature 1..25: note = Description of Artificial Sequence: Synthetic oligonucleotide
  source 1..25: mol_type = other RNA
caaattaagtgcctctgttttgaac

SEQ ID NO: 563 - RNA, 25 nt, synthetic construct
  misc_feature 1..25: note = Description of Artificial Sequence: Synthetic oligonucleotide
  source 1..25: mol_type = other RNA
aaattaagtgcctctgttttgaaca

SEQ ID NO: 564 - RNA, 25 nt, synthetic construct
  misc_feature 1..25: note = Description of Artificial Sequence: Synthetic oligonucleotide
  source 1..25: mol_type = other RNA
agttacgacaaacagctttcattac

SEQ ID NO: 565 - RNA, 25 nt, synthetic construct
  misc_feature 1..25: note = Description of Artificial Sequence: Synthetic oligonucleotide
  source 1..25: mol_type = other RNA
acagctttcattacaggaatagaaa

SEQ ID NO: 566 - RNA, 25 nt, synthetic construct
  misc_feature 1..25: note = Description of Artificial Sequence: Synthetic oligonucleotide
  source 1..25: mol_type = other RNA
atttacaaaaaagtattgactaaag

SEQ ID NO: 567 - RNA, 25 nt, synthetic construct
  misc_feature 1..25: note = Description of Artificial Sequence: Synthetic oligonucleotide
  source 1..25: mol_type = other RNA
tttacaaaaaagtattgactaaagc

SEQ ID NO: 568 - RNA, 25 nt, synthetic construct
  misc_feature 1..25: note = Description of Artificial Sequence: Synthetic oligonucleotide
  source 1..25: mol_type = other RNA
taaatataaagcaccatttagtttt

SEQ ID NO: 569 - RNA, 25 nt, synthetic construct
  misc_feature 1..25: note = Description of Artificial Sequence: Synthetic oligonucleotide
  source 1..25: mol_type = other RNA
ggcaatgaaaaaaactgcaaaacat

SEQ ID NO: 570 - RNA, 25 nt, synthetic construct
  misc_feature 1..25: note = Description of Artificial Sequence: Synthetic oligonucleotide
  source 1..25: mol_type = other RNA
tctttctttcttttactgcatatga

SEQ ID NO: 571 - RNA, 25 nt, synthetic construct
  misc_feature 1..25: note = Description of Artificial Sequence: Synthetic oligonucleotide
  source 1..25: mol_type = other RNA
tttactgcatatgaaggtaagatgc

SEQ ID NO: 572 - RNA, 25 nt, synthetic construct
  misc_feature 1..25: note = Description of Artificial Sequence: Synthetic oligonucleotide
  source 1..25: mol_type = other RNA
atatgaaggtaagatgctggaatgt

SEQ ID NO: 573 - RNA, 25 nt, synthetic construct
  misc_feature 1..25: note = Description of Artificial Sequence: Synthetic oligonucleotide
  source 1..25: mol_type = other RNA
tatgaaggtaagatgctggaatgta

SEQ ID NO: 574 - RNA, 25 nt, synthetic construct
  misc_feature 1..25: note = Description of Artificial Sequence: Synthetic oligonucleotide
  source 1..25: mol_type = other RNA
agatgctggaatgtagggtgataga

SEQ ID NO: 575 - RNA, 25 nt, synthetic construct
  misc_feature 1..25: note = Description of Artificial Sequence: Synthetic oligonucleotide
  source 1..25: mol_type = other RNA
ctggaatgtagggtgatagaaggaa

SEQ ID NO: 576 - RNA, 25 nt, synthetic construct
  misc_feature 1..25: note = Description of Artificial Sequence: Synthetic oligonucleotide
  source 1..25: mol_type = other RNA
tggaatgtagggtgatagaaggaaa

SEQ ID NO: 577 - RNA, 25 nt, synthetic construct
  misc_feature 1..25: note = Description of Artificial Sequence: Synthetic oligonucleotide
  source 1..25: mol_type = other RNA
ttagcttgcagtactgcatacagta

SEQ ID NO: 578 - RNA, 25 nt, synthetic construct
  misc_feature 1..25: note = Description of Artificial Sequence: Synthetic oligonucleotide
  source 1..25: mol_type = other RNA
gcagtactgcatacagtatggcagc

SEQ ID NO: 579 - RNA, 25 nt, synthetic construct
  misc_feature 1..25: note = Description of Artificial Sequence: Synthetic oligonucleotide
  source 1..25: mol_type = other RNA
tgcatacagtatggcagcaggaaaa

SEQ ID NO: 580 - RNA, 25 nt, synthetic construct
  misc_feature 1..25: note = Description of Artificial Sequence: Synthetic oligonucleotide
  source 1..25: mol_type = other RNA
tggcagcaggaaaaaggaacaaaaa

SEQ ID NO: 581 - RNA, 25 nt, synthetic construct
  misc_feature 1..25: note = Description of Artificial Sequence: Synthetic oligonucleotide
  source 1..25: mol_type = other RNA
acagccatccatgtgacattctagc

SEQ ID NO: 582 - RNA, 25 nt, synthetic construct
  misc_feature 1..25: note = Description of Artificial Sequence: Synthetic oligonucleotide
  source 1..25: mol_type = other RNA
caggctcccccaaaccgccattata

SEQ ID NO: 583 - RNA, 25 nt, synthetic construct
  misc_feature 1..25: note = Description of Artificial Sequence: Synthetic oligonucleotide
  source 1..25: mol_type = other RNA
cctgccaaattaaaaaaatatactg

SEQ ID NO: 584 - RNA, 25 nt, synthetic construct
  misc_feature 1..25: note = Description of Artificial Sequence: Synthetic oligonucleotide
  source 1..25: mol_type = other RNA
tcttttttttttccactaccaaaaa

SEQ ID NO: 585 - RNA, 25 nt, synthetic construct
  misc_feature 1..25: note = Description of Artificial Sequence: Synthetic oligonucleotide
  source 1..25: mol_type = other RNA
aaagaccataaatgtattttagcat

SEQ ID NO: 586 - RNA, 25 nt, synthetic construct
  misc_feature 1..25: note = Description of Artificial Sequence: Synthetic oligonucleotide
  source 1..25: mol_type = other RNA
ttttttttttttacaacctgaagag

SEQ ID NO: 587 - RNA, 25 nt, synthetic construct
  misc_feature 1..25: note = Description of Artificial Sequence: Synthetic oligonucleotide
  source 1..25: mol_type = other RNA
caacctgaagagcggtgtgtatcca

SEQ ID NO: 588 - RNA, 25 nt, synthetic construct
  misc_feature 1..25: note = Description of Artificial Sequence: Synthetic oligonucleotide
  source 1..25: mol_type = other RNA
tagaatttccactaccatttttaaa

SEQ ID NO: 589 - RNA, 25 nt, synthetic construct
  misc_feature 1..25: note = Description of Artificial Sequence: Synthetic oligonucleotide
  source 1..25: mol_type = other RNA
aagtcttgtaacaccaccaagacaa

SEQ ID NO: 590 - RNA, 25 nt, synthetic construct
  misc_feature 1..25: note = Description of Artificial Sequence: Synthetic oligonucleotide
  source 1..25: mol_type = other RNA
taagtaagctcaatagtcaagtaaa

SEQ ID NO: 591 - RNA, 25 nt, synthetic construct
  misc_feature 1..25: note = Description of Artificial Sequence: Synthetic oligonucleotide
  source 1..25: mol_type = other RNA
taagctcaatagtcaagtaaatggc

SEQ ID NO: 592 - RNA, 25 nt, synthetic construct
  misc_feature 1..25: note = Description of Artificial Sequence: Synthetic oligonucleotide
  source 1..25: mol_type = other RNA
ttcccttaagtatagacctgtaaac

SEQ ID NO: 593 - RNA, 25 nt, synthetic construct
  misc_feature 1..25: note = Description of Artificial Sequence: Synthetic oligonucleotide
  source 1..25: mol_type = other RNA
tcccttaagtatagacctgtaaact

SEQ ID NO: 594 - RNA, 25 nt, synthetic construct
  misc_feature 1..25: note = Description of Artificial Sequence: Synthetic oligonucleotide
  source 1..25: mol_type = other RNA
gtgcacttaattgtcctatctgagc

SEQ ID NO: 595 - RNA, 25 nt, synthetic construct
  misc_feature 1..25: note = Description of Artificial Sequence: Synthetic oligonucleotide
  source 1..25: mol_type = other RNA
attagagaaaagatacagatatcac

SEQ ID NO: 596 - RNA, 25 nt, synthetic construct
  misc_feature 1..25: note = Description of Artificial Sequence: Synthetic oligonucleotide
  source 1..25: mol_type = other RNA
agtcaagtgctatttgaacaccaac

SEQ ID NO: 597 - RNA, 25 nt, synthetic construct
  misc_feature 1..25: note = Description of Artificial Sequence: Synthetic oligonucleotide
  source 1..25: mol_type = other RNA
gtcaagtgctatttgaacaccaact

SEQ ID NO: 598 - RNA, 25 nt, synthetic construct
  misc_feature 1..25: note = Description of Artificial Sequence: Synthetic oligonucleotide
  source 1..25: mol_type = other RNA
tcaagtgctatttgaacaccaactg

SEQ ID NO: 599 - RNA, 25 nt, synthetic construct
  misc_feature 1..25: note = Description of Artificial Sequence: Synthetic oligonucleotide
  source 1..25: mol_type = other RNA
gttaacacaaatagcacacagtgta

SEQ ID NO: 600 - RNA, 25 nt, synthetic construct
  misc_feature 1..25: note = Description of Artificial Sequence: Synthetic oligonucleotide
  source 1..25: mol_type = other RNA
ggaaaagaaatgaagtacaactttt

SEQ ID NO: 601 - RNA, 25 nt, synthetic construct
  misc_feature 1..25: note = Description of Artificial Sequence: Synthetic oligonucleotide
  source 1..25: mol_type = other RNA
gaaaagaaatgaagtacaactttta

SEQ ID NO: 602 - RNA, 25 nt, synthetic construct
  misc_feature 1..25: note = Description of Artificial Sequence: Synthetic oligonucleotide
  source 1..25: mol_type = other RNA
cttatatacctgttctagttttaaa

SEQ ID NO: 603 - RNA, 25 nt, synthetic construct
  misc_feature 1..25: note = Description of Artificial Sequence: Synthetic oligonucleotide
  source 1..25: mol_type = other RNA
tattgtcagcctcttcctttcaata

SEQ ID NO: 604 - RNA, 25 nt, synthetic construct
  misc_feature 1..25: note = Description of Artificial Sequence: Synthetic oligonucleotide
  source 1..25: mol_type = other RNA
cctcttcctttcaatatggtataca

SEQ ID NO: 605 - RNA, 25 nt, synthetic construct
  misc_feature 1..25: note = Description of Artificial Sequence: Synthetic oligonucleotide
  source 1..25: mol_type = other RNA
tgtccacttgacaaccaagtagatc

SEQ ID NO: 606 - RNA, 25 nt, synthetic construct
  misc_feature 1..25: note = Description of Artificial Sequence: Synthetic oligonucleotide
  source 1..25: mol_type = other RNA
caagtagatctggatctatttcttt

SEQ ID NO: 607 - RNA, 25 nt, synthetic construct
  misc_feature 1..25: note = Description of Artificial Sequence: Synthetic oligonucleotide
  source 1..25: mol_type = other RNA
ttactagtgtatttaattgcgttcc

SEQ ID NO: 608 - RNA, 25 nt, synthetic construct
  misc_feature 1..25: note = Description of Artificial Sequence: Synthetic oligonucleotide
  source 1..25: mol_type = other RNA
tactagtgtatttaattgcgttcca

SEQ ID NO: 609 - RNA, 25 nt, synthetic construct
  misc_feature 1..25: note = Description of Artificial Sequence: Synthetic oligonucleotide
  source 1..25: mol_type = other RNA
tcattgtttaaaaaaaataaaactt

SEQ ID NO: 610 - RNA, 25 nt, synthetic construct
  misc_feature 1..25: note = Description of Artificial Sequence: Synthetic oligonucleotide
  source 1..25: mol_type = other RNA
cattgtttaaaaaaaataaaacttt

SEQ ID NO: 611 - RNA, 25 nt, synthetic construct
  misc_feature 1..25: note = Description of Artificial Sequence: Synthetic oligonucleotide
  source 1..25: mol_type = other RNA
agcccatttcttttaagctctcacc

SEQ ID NO: 612 - RNA, 25 nt, synthetic construct
  misc_feature 1..25: note = Description of Artificial Sequence: Synthetic oligonucleotide
  source 1..25: mol_type = other RNA
accaggagcaaagtagcttttatac

SEQ ID NO: 613 - RNA, 25 nt, synthetic construct
  misc_feature 1..25: note = Description of Artificial Sequence: Synthetic oligonucleotide
  source 1..25: mol_type = other RNA
agttttgtttataaaattaaactaa

SEQ ID NO: 614 - RNA, 25 nt, synthetic construct
  misc_feature 1..25: note = Description of Artificial Sequence: Synthetic oligonucleotide
  source 1..25: mol_type = other RNA
actaaaggaaaaatgatgattaact

SEQ ID NO: 615 - RNA, 25 nt, synthetic construct
  misc_feature 1..25: note = Description of Artificial Sequence: Synthetic oligonucleotide
  source 1..25: mol_type = other RNA
aaaatgatgattaactaggacataa

SEQ ID NO: 616 - RNA, 25 nt, synthetic construct
  misc_feature 1..25: note = Description of Artificial Sequence: Synthetic oligonucleotide
  source 1..25: mol_type = other RNA
aaatgatgattaactaggacataat

SEQ ID NO: 617 - RNA, 25 nt, synthetic construct
  misc_feature 1..25: note = Description of Artificial Sequence: Synthetic oligonucleotide
  source 1..25: mol_type = other RNA
ctaggacataatgggtcatcttttt

SEQ ID NO: 618 - RNA, 25 nt, synthetic construct
  misc_feature 1..25: note = Description of Artificial Sequence: Synthetic oligonucleotide
  source 1..25: mol_type = other RNA
atatagaattatatgctagttccta

SEQ ID NO: 619 - RNA, 25 nt, synthetic construct
  misc_feature 1..25: note = Description of Artificial Sequence: Synthetic oligonucleotide
  source 1..25: mol_type = other RNA
taacaagtagaaagaaccatcgatg

SEQ ID NO: 620 - RNA, 25 nt, synthetic construct
  misc_feature 1..25: note = Description of Artificial Sequence: Synthetic oligonucleotide
  source 1..25: mol_type = other RNA
catcgatgtggttttaatagatcca

SEQ ID NO: 621 - RNA, 25 nt, synthetic construct
  misc_feature 1..25: note = Description of Artificial Sequence: Synthetic oligonucleotide
  source 1..25: mol_type = other RNA
gtttttctgttaatttgtcaattca

SEQ ID NO: 622 - RNA, 25 nt, synthetic construct
  misc_feature 1..25: note = Description of Artificial Sequence: Synthetic oligonucleotide
  source 1..25: mol_type = other RNA
tcagtgctatctattctgtctatag

SEQ ID NO: 623 - RNA, 25 nt, synthetic construct
  misc_feature 1..25: note = Description of Artificial Sequence: Synthetic oligonucleotide
  source 1..25: mol_type = other RNA
cagtgctatctattctgtctataga

SEQ ID NO: 624 - RNA, 25 nt, synthetic construct
  misc_feature 1..25: note = Description of Artificial Sequence: Synthetic oligonucleotide
  source 1..25: mol_type = other RNA
tatgtattacagaatgtatgcagca

SEQ ID NO: 625 - RNA, 25 nt, synthetic construct
  misc_feature 1..25: note = Description of Artificial Sequence: Synthetic oligonucleotide
  source 1..25: mol_type = other RNA
ctctctctctctttttctctcagaa

SEQ ID NO: 626 - RNA, 25 nt, synthetic construct
  misc_feature 1..25: note = Description of Artificial Sequence: Synthetic oligonucleotide
  source 1..25: mol_type = other RNA
ctctctttttctctcagaacggaac

SEQ ID NO: 627 - RNA, 25 nt, synthetic construct
  misc_feature 1..25: note = Description of Artificial Sequence: Synthetic oligonucleotide
  source 1..25: mol_type = other RNA
caacatgtttgctcagcaacgaatt

SEQ ID NO: 628 - RNA, 25 nt, synthetic construct
  misc_feature 1..25: note = Description of Artificial Sequence: Synthetic oligonucleotide
  source 1..25: mol_type = other RNA
aacatgtttgctcagcaacgaatta

SEQ ID NO: 629 - RNA, 25 nt, synthetic construct
  misc_feature 1..25: note = Description of Artificial Sequence: Synthetic oligonucleotide
  source 1..25: mol_type = other RNA
acatgtaaattattgcacaagagaa

SEQ ID NO: 630 - RNA, 25 nt, synthetic construct
  misc_feature 1..25: note = Description of Artificial Sequence: Synthetic oligonucleotide
  source 1..25: mol_type = other RNA
gccccatacagatcatgcattcaaa

SEQ ID NO: 631 - RNA, 25 nt, synthetic construct
  misc_feature 1..25: note = Description of Artificial Sequence: Synthetic oligonucleotide
  source 1..25: mol_type = other RNA
atgcattcaaacggtgagaacataa

SEQ ID NO: 632 - RNA, 25 nt, synthetic construct
  misc_feature 1..25: note = Description of Artificial Sequence: Synthetic oligonucleotide
  source 1..25: mol_type = other RNA
aaagaaaaagaaaaagaaaaaaaac

SEQ ID NO: 633 - RNA, 25 nt, synthetic construct
  misc_feature 1..25: note = Description of Artificial Sequence: Synthetic oligonucleotide
  source 1..25: mol_type = other RNA
agaaaaagaaaaaaaacaggtgtgc

SEQ ID NO: 634 - RNA, 25 nt, synthetic construct
  misc_feature 1..25: note = Description of Artificial Sequence: Synthetic oligonucleotide
  source 1..25: mol_type = other RNA
tgtttgtttgtttgtttaaatcaca

SEQ ID NO: 635 - RNA, 25 nt, synthetic construct
  misc_feature 1..25: note = Description of Artificial Sequence: Synthetic oligonucleotide
  source 1..25: mol_type = other RNA
gtttgtttgtttgtttaaatcacat

SEQ ID NO: 636 - RNA, 25 nt, synthetic construct
  misc_feature 1..25: note = Description of Artificial Sequence: Synthetic oligonucleotide
  source 1..25: mol_type = other RNA
acatgggactagaaaaaaatcctac

SEQ ID NO: 637 - RNA, 25 nt, synthetic construct
  misc_feature 1..25: note = Description of Artificial Sequence: Synthetic oligonucleotide
  source 1..25: mol_type = other RNA
catgggactagaaaaaaatcctaca

SEQ ID NO: 638 - RNA, 25 nt, synthetic construct
  misc_feature 1..25: note = Description of Artificial Sequence: Synthetic oligonucleotide
  source 1..25: mol_type = other RNA
gactagaaaaaaatcctacagggag

SEQ ID NO: 639 - RNA, 25 nt, synthetic construct
  misc_feature 1..25: note = Description of Artificial Sequence: Synthetic oligonucleotide
  source 1..25: mol_type = other RNA
actagaaaaaaatcctacagggagt

SEQ ID NO: 640 - RNA, 25 nt, synthetic construct
  misc_feature 1..25: note = Description of Artificial Sequence: Synthetic oligonucleotide
  source 1..25: mol_type = other RNA
ctagaaaaaaatcctacagggagtg

SEQ ID NO: 641 - RNA, 25 nt, synthetic construct
  misc_feature 1..25: note = Description of Artificial Sequence: Synthetic oligonucleotide
  source 1..25: mol_type = other RNA
aaaaaaatcctacagggagtggggc

SEQ ID NO: 642 - RNA, 25 nt, synthetic construct
  misc_feature 1..25: note = Description of Artificial Sequence: Synthetic oligonucleotide
  source 1..25: mol_type = other RNA
aaaatcctacagggagtggggctgg

SEQ ID NO: 643 - RNA, 25 nt, synthetic construct
  misc_feature 1..25: note = Description of Artificial Sequence: Synthetic oligonucleotide
  source 1..25: mol_type = other RNA
aaatcctacagggagtggggctgga

SEQ ID NO: 644 - RNA, 25 nt, synthetic construct
  misc_feature 1..25: note = Description of Artificial Sequence: Synthetic oligonucleotide
  source 1..25: mol_type = other RNA
tacagggagtggggctggagggcga

SEQ ID NO: 645 - RNA, 25 nt, synthetic construct
  misc_feature 1..25: note = Description of Artificial Sequence: Synthetic oligonucleotide
  source 1..25: mol_type = other RNA
acagggagtggggctggagggcgat

SEQ ID NO: 646 - RNA, 25 nt, synthetic construct
  misc_feature 1..25: note = Description of Artificial Sequence: Synthetic oligonucleotide
  source 1..25: mol_type = other RNA
cagggagtggggctggagggcgatg

SEQ ID NO: 647 - RNA, 25 nt, synthetic construct
  misc_feature 1..25: note = Description of Artificial Sequence: Synthetic oligonucleotide
  source 1..25: mol_type = other RNA
gagtggggctggagggcgatgggga

SEQ ID NO: 648 - RNA, 25 nt, synthetic construct
  misc_feature 1..25: note = Description of Artificial Sequence: Synthetic oligonucleotide
  source 1..25: mol_type = other RNA
agtggggctggagggcgatggggaa

SEQ ID NO: 649 - RNA, 25 nt, synthetic construct
  misc_feature 1..25: note = Description of Artificial Sequence: Synthetic oligonucleotide
  source 1..25: mol_type = other RNA
gtggggctggagggcgatggggaag

SEQ ID NO: 650 - RNA, 25 nt, synthetic construct
  misc_feature 1..25: note = Description of Artificial Sequence: Synthetic oligonucleotide
  source 1..25: mol_type = other RNA
gctggagggcgatggggaaggggag

SEQ ID NO: 651 - RNA, 25 nt, synthetic construct
  misc_feature 1..25: note = Description of Artificial Sequence: Synthetic oligonucleotide
  source 1..25: mol_type = other RNA
cgatggggaaggggagtggtgaaaa

SEQ ID NO: 652 - RNA, 25 nt, synthetic construct
  misc_feature 1..25: note = Description of Artificial Sequence: Synthetic oligonucleotide
  source 1..25: mol_type = other RNA
gatggggaaggggagtggtgaaaaa

SEQ ID NO: 653 - RNA, 25 nt, synthetic construct
  misc_feature 1..25: note = Description of Artificial Sequence: Synthetic oligonucleotide
  source 1..25: mol_type = other RNA
atggggaaggggagtggtgaaaaag

SEQ ID NO: 654 - RNA, 25 nt, synthetic construct
  misc_feature 1..25: note = Description of Artificial Sequence: Synthetic oligonucleotide
  source 1..25: mol_type = other RNA
tggggaaggggagtggtgaaaaagg

SEQ ID NO: 655 - RNA, 25 nt, synthetic construct
  misc_feature 1..25: note = Description of Artificial Sequence: Synthetic oligonucleotide
  source 1..25: mol_type = other RNA
ggggagtggtgaaaaagggggtgtc

SEQ ID NO: 656 - RNA, 25 nt, synthetic construct
  misc_feature 1..25: note = Description of Artificial Sequence: Synthetic oligonucleotide
  source 1..25: mol_type = other RNA
gagtggtgaaaaagggggtgtcagg

SEQ ID NO: 657 - RNA, 25 nt, synthetic construct
  misc_feature 1..25: note = Description of Artificial Sequence: Synthetic oligonucleotide
  source 1..25: mol_type = other RNA
agtggtgaaaaagggggtgtcaggt

SEQ ID NO: 658 - RNA, 25 nt, synthetic construct
  misc_feature 1..25: note = Description of Artificial Sequence: Synthetic oligonucleotide
  source 1..25: mol_type = other RNA
aaaaagggggtgtcaggtgggagtg

SEQ ID NO: 659 - RNA, 25 nt, synthetic construct
  misc_feature 1..25: note = Description of Artificial Sequence: Synthetic oligonucleotide
  source 1..25: mol_type = other RNA
aaaagggggtgtcaggtgggagtga

SEQ ID NO: 660 - RNA, 25 nt, synthetic construct
  misc_feature 1..25: note = Description of Artificial Sequence: Synthetic oligonucleotide
  source 1..25: mol_type = other RNA
agggggtgtcaggtgggagtgaggg

SEQ ID NO: 661 - RNA, 25 nt, synthetic construct
  misc_feature 1..25: note = Description of Artificial Sequence: Synthetic oligonucleotide
  source 1..25: mol_type = other RNA
gggggtgtcaggtgggagtgaggga

SEQ ID NO: 662 - RNA, 25 nt, synthetic construct
  misc_feature 1..25: note = Description of Artificial Sequence: Synthetic oligonucleotide
  source 1..25: mol_type = other RNA
ggggtgtcaggtgggagtgagggag

SEQ ID NO: 663 - RNA, 25 nt, synthetic construct
  misc_feature 1..25: note = Description of Artificial Sequence: Synthetic oligonucleotide
  source 1..25: mol_type = other RNA
gtgccattttttcatgtgtttctcc

SEQ ID NO: 664 - RNA, 25 nt, synthetic construct
  misc_feature 1..25: note = Description of Artificial Sequence: Synthetic oligonucleotide
  source 1..25: mol_type = other RNA
tgccattttttcatgtgtttctcca

SEQ ID NO: 665 - RNA, 25 nt, synthetic construct
  misc_feature 1..25: note = Description of Artificial Sequence: Synthetic oligonucleotide
  source 1..25: mol_type = other RNA
tctccagggtactgtacacgctaaa

SEQ ID NO: 666 - RNA, 25 nt, synthetic construct
  misc_feature 1..25: note = Description of Artificial Sequence: Synthetic oligonucleotide
  source 1..25: mol_type = other RNA
acatttgtaaacgtccttccccacc

SEQ ID NO: 667 - RNA, 25 nt, synthetic construct
  misc_feature 1..25: note = Description of Artificial Sequence: Synthetic oligonucleotide
  source 1..25: mol_type = other RNA
acctggccatgcgttttcatgtgcc

SEQ ID NO: 668 - RNA, 25 nt, synthetic construct
  misc_feature 1..25: note = Description of Artificial Sequence: Synthetic oligonucleotide
  source 1..25: mol_type = other RNA
catgtgcctggtgagcttgctactc

SEQ ID NO: 669 - RNA, 25 nt, synthetic construct
  misc_feature 1..25: note = Description of Artificial Sequence: Synthetic oligonucleotide
  source 1..25: mol_type = other RNA
atgtgcctggtgagcttgctactct

SEQ ID NO: 670 - RNA, 25 nt, synthetic construct
  misc_feature 1..25: note = Description of Artificial Sequence: Synthetic oligonucleotide
  source 1..25: mol_type = other RNA
ctggtgagcttgctactctgggcac

SEQ ID NO: 671 - RNA, 25 nt, synthetic construct
  misc_feature 1..25: note = Description of Artificial Sequence: Synthetic oligonucleotide
  source 1..25: mol_type = other RNA
catagttgcacagctcgcatttata

SEQ ID NO: 672 - RNA, 25 nt, synthetic construct
  misc_feature 1..25: note = Description of Artificial Sequence: Synthetic oligonucleotide
  source 1..25: mol_type = other RNA
gcatttataaggcctttcgcccgtg

SEQ ID NO: 673 - RNA, 25 nt, synthetic construct
  misc_feature 1..25: note = Description of Artificial Sequence: Synthetic oligonucleotide
  source 1..25: mol_type = other RNA
cctttcgcccgtgtggcttctcctg

SEQ ID NO: 674 - RNA, 25 nt, synthetic construct
  misc_feature 1..25: note = Description of Artificial Sequence: Synthetic oligonucleotide
  source 1..25: mol_type = other RNA
tcgctgcgtctgccctcttttgagc

SEQ ID NO: 675 - RNA, 25 nt, synthetic construct
  misc_feature 1..25: note = Description of Artificial Sequence: Synthetic oligonucleotide
  source 1..25: mol_type = other RNA
cgctgcgtctgccctcttttgagct

SEQ ID NO: 676 - RNA, 25 nt, synthetic construct
  misc_feature 1..25: note = Description of Artificial Sequence: Synthetic oligonucleotide
  source 1..25: mol_type = other RNA
tgccctcttttgagctgggcctgcc

SEQ ID NO: 677 - RNA, 25 nt, synthetic construct
  misc_feature 1..25: note = Description of Artificial Sequence: Synthetic oligonucleotide
  source 1..25: mol_type = other RNA
gccctcttttgagctgggcctgccc

SEQ ID NO: 678 - RNA, 25 nt, synthetic construct
  misc_feature 1..25: note = Description of Artificial Sequence: Synthetic oligonucleotide
  source 1..25: mol_type = other RNA
cttttgagctgggcctgcccgggcc

SEQ ID NO: 679 - RNA, 25 nt, synthetic construct
  misc_feature 1..25: note = Description of Artificial Sequence: Synthetic oligonucleotide
  source 1..25: mol_type = other RNA
cctgcccgggcccggaccactaata

SEQ ID NO: 680 - RNA, 25 nt, synthetic construct
  misc_feature 1..25: note = Description of Artificial Sequence: Synthetic oligonucleotide
  source 1..25: mol_type = other RNA
ctgcccgggcccggaccactaatat

SEQ ID NO: 681 - RNA, 25 nt, synthetic construct
  misc_feature 1..25: note = Description of Artificial Sequence: Synthetic oligonucleotide
  source 1..25: mol_type = other RNA
tgcccgggcccggaccactaatatg

SEQ ID NO: 682 - RNA, 25 nt, synthetic construct
  misc_feature 1..25: note = Description of Artificial Sequence: Synthetic oligonucleotide
  source 1..25: mol_type = other RNA
cccgagatccctccgtccagctccc

SEQ ID NO: 683 - RNA, 25 nt, synthetic construct
  misc_feature 1..25: note = Description of Artificial Sequence: Synthetic oligonucleotide
  source 1..25: mol_type = other RNA
ccgagatccctccgtccagctcccc

SEQ ID NO: 684 - RNA, 25 nt, synthetic construct
  misc_feature 1..25: note = Description of Artificial Sequence: Synthetic oligonucleotide
  source 1..25: mol_type = other RNA
agatccctccgtccagctccccggg

SEQ ID NO: 685 - RNA, 25 nt, synthetic construct
  misc_feature 1..25: note = Description of Artificial Sequence: Synthetic oligonucleotide
  source 1..25: mol_type = other RNA
cctccgtccagctccccgggcggtg

SEQ ID NO: 686 - RNA, 25 nt, synthetic construct
  misc_feature 1..25: note = Description of Artificial Sequence: Synthetic oligonucleotide
  source 1..25: mol_type = other RNA
gagaagcgcaaactcccgttctccg

SEQ ID NO: 687 - RNA, 25 nt, synthetic construct
  misc_feature 1..25: note = Description of Artificial Sequence: Synthetic oligonucleotide
  source 1..25: mol_type = other RNA
ccgttctccgaggagtgctccgacg

SEQ ID NO: 688 - RNA, 25 nt, synthetic construct
  misc_feature 1..25: note = Description of Artificial Sequence: Synthetic oligonucleotide
  source 1..25: mol_type = other RNA
ttctccgaggagtgctccgacgagg

SEQ ID NO: 689 - RNA, 25 nt, synthetic construct
  misc_feature 1..25: note = Description of Artificial Sequence: Synthetic oligonucleotide
  source 1..25: mol_type = other RNA
aggagtgctccgacgaggaggcaaa

SEQ ID NO: 690 - RNA, 25 nt, synthetic construct
  misc_feature 1..25: note = Description of Artificial Sequence: Synthetic oligonucleotide
  source 1..25: mol_type = other RNA
gacgaggaggcaaaaggcgattgtc

SEQ ID NO: 691 - RNA, 25 nt, synthetic construct
  misc_feature 1..25: note = Description of Artificial Sequence: Synthetic oligonucleotide
  source 1..25: mol_type = other RNA
cgattgtctggagtctccgaagcta

SEQ ID NO: 692 - RNA, 25 nt, synthetic construct
  misc_feature 1..25: note = Description of Artificial Sequence: Synthetic oligonucleotide
  source 1..25: mol_type = other RNA
tgtctggagtctccgaagctaagga

SEQ ID NO: 693 - RNA, 25 nt, synthetic construct
  misc_feature 1..25: note = Description of Artificial Sequence: Synthetic oligonucleotide
  source 1..25: mol_type = other RNA
gtctggagtctccgaagctaaggaa

SEQ ID NO: 694 - RNA, 25 nt, synthetic construct
  misc_feature 1..25: note = Description of Artificial Sequence: Synthetic oligonucleotide
  source 1..25: mol_type = other RNA
ctaaggaagggatctttgagctgcc

SEQ ID NO: 695 - RNA, 25 nt, synthetic construct
  misc_feature 1..25: note = Description of Artificial Sequence: Synthetic oligonucleotide
  source 1..25: mol_type = other RNA
aggaagggatctttgagctgcctgg

SEQ ID NO: 696 - RNA, 25 nt, synthetic construct
  misc_feature 1..25: note = Description of Artificial Sequence: Synthetic oligonucleotide
  source 1..25: mol_type = other RNA
ttgagctgcctggaggccgcgtagc

SEQ ID NO: 697 - RNA, 25 nt, synthetic construct
  misc_feature 1..25: note = Description of Artificial Sequence: Synthetic oligonucleotide
  source 1..25: mol_type = other RNA
cactgcgagtacacgttctccgtgt

SEQ ID NO: 698 - RNA, 25 nt, synthetic construct
  misc_feature 1..25: note = Description of Artificial Sequence: Synthetic oligonucleotide
  source 1..25: mol_type = other RNA
actgcgagtacacgttctccgtgtt

SEQ ID NO: 699 - RNA, 25 nt, synthetic construct
  misc_feature 1..25: note = Description of Artificial Sequence: Synthetic oligonucleotide
  source 1..25: mol_type = other RNA
tacacgttctccgtgttgggcatcg

SEQ ID NO: 700 - RNA, 25 nt, synthetic construct
  misc_feature 1..25: note = Description of Artificial Sequence: Synthetic oligonucleotide
  source 1..25: mol_type = other RNA
cgttctccgtgttgggcatcgcggc

SEQ ID NO: 701 - RNA, 25 nt, synthetic construct
  misc_feature 1..25: note = Description of Artificial Sequence: Synthetic oligonucleotide
  source 1..25: mol_type = other RNA
gttctccgtgttgggcatcgcggcc

SEQ ID NO: 702 - RNA, 25 nt, synthetic construct
  misc_feature 1..25: note = Description of Artificial Sequence: Synthetic oligonucleotide
  source 1..25: mol_type = other RNA
ttctccgtgttgggcatcgcggccg

SEQ ID NO: 703 - RNA, 25 nt, synthetic construct
  misc_feature 1..25: note = Description of Artificial Sequence: Synthetic oligonucleotide
  source 1..25: mol_type = other RNA
tctccgtgttgggcatcgcggccgg

SEQ ID NO: 704 - RNA, 25 nt, synthetic construct
  misc_feature 1..25: note = Description of Artificial Sequence: Synthetic oligonucleotide
  source 1..25: mol_type = other RNA
cgtgttgggcatcgcggccgggggc

SEQ ID NO: 705 - RNA, 25 nt, synthetic construct
  misc_feature 1..25: note = Description of Artificial Sequence: Synthetic oligonucleotide
  source 1..25: mol_type = other RNA
ttctcgagcttgatgcgcttagaga

SEQ ID NO: 706 - RNA, 25 nt, synthetic construct
  misc_feature 1..25: note = Description of Artificial Sequence: Synthetic oligonucleotide
  source 1..25: mol_type = other RNA
tctcgagcttgatgcgcttagagaa

SEQ ID NO: 707 - RNA, 25 nt, synthetic construct
  misc_feature 1..25: note = Description of Artificial Sequence: Synthetic oligonucleotide
  source 1..25: mol_type = other RNA
ctcgagcttgatgcgcttagagaag

SEQ ID NO: 708 - RNA, 25 nt, synthetic construct
  misc_feature 1..25: note = Description of Artificial Sequence: Synthetic oligonucleotide
  source 1..25: mol_type = other RNA
cgcttagagaaggggctcagcgagc

SEQ ID NO: 709 - RNA, 25 nt, synthetic construct
  misc_feature 1..25: note = Description of Artificial Sequence: Synthetic oligonucleotide
  source 1..25: mol_type = other RNA
gcttagagaaggggctcagcgagct

SEQ ID NO: 710 - RNA, 25 nt, synthetic construct
  misc_feature 1..25: note = Description of Artificial Sequence: Synthetic oligonucleotide
  source 1..25: mol_type = other RNA
cttagagaaggggctcagcgagctg

SEQ ID NO: 711 - RNA, 25 nt, synthetic construct
  misc_feature 1..25: note = Description of Artificial Sequence: Synthetic oligonucleotide
  source 1..25: mol_type = other RNA
ctggggctgcccagcagcagctttt

SEQ ID NO: 712 - RNA, 25 nt, synthetic construct
  misc_feature 1..25: note = Description of Artificial Sequence: Synthetic oligonucleotide
  source 1..25: mol_type = other RNA
gctgcccagcagcagctttttggac

SEQ ID NO: 713 - RNA, 25 nt, synthetic construct
  misc_feature 1..25: note = Description of Artificial Sequence: Synthetic oligonucleotide
  source 1..25: mol_type = other RNA
agcagctttttggacaggccccccg

SEQ ID NO: 714 - RNA, 25 nt, synthetic construct
  misc_feature 1..25: note = Description of Artificial Sequence: Synthetic oligonucleotide
  source 1..25: mol_type = other RNA
acaggccccccgaggccgactcgcc

SEQ ID NO: 715 - RNA, 25 nt, synthetic construct
  misc_feature 1..25: note = Description of Artificial Sequence: Synthetic oligonucleotide
  source 1..25: mol_type = other RNA
caggccccccgaggccgactcgccc

SEQ ID NO: 716 - RNA, 25 nt, synthetic construct
  misc_feature 1..25: note = Description of Artificial Sequence: Synthetic oligonucleotide
  source 1..25: mol_type = other RNA
aggccccccgaggccgactcgcccg

SEQ ID NO: 717 - RNA, 25 nt, synthetic construct
  misc_feature 1..25: note = Description of Artificial Sequence: Synthetic oligonucleotide
  source 1..25: mol_type = other RNA
ggccgactcgcccggggagcagccg

SEQ ID NO: 718 - RNA, 25 nt, synthetic construct
  misc_feature 1..25: note = Description of Artificial Sequence: Synthetic oligonucleotide
  source 1..25: mol_type = other RNA
gccattaacagtgccatcgtctatg

SEQ ID NO: 719 - RNA, 25 nt, synthetic construct
  misc_feature 1..25: note = Description of Artificial Sequence: Synthetic oligonucleotide
  source 1..25: mol_type = other RNA
ccatcgtctatgcggtccgactcgc

SEQ ID NO: 720 - RNA, 25 nt, synthetic construct
  misc_feature 1..25: note = Description of Artificial Sequence: Synthetic oligonucleotide
  source 1..25: mol_type = other RNA
cgagtcttcgtcgcaagtgtccctg

SEQ ID NO: 721 - RNA, 25 nt, synthetic construct
  misc_feature 1..25: note = Description of Artificial Sequence: Synthetic oligonucleotide
  source 1..25: mol_type = other RNA
tcgtcgcaagtgtccctgtggccct

SEQ ID NO: 722 - RNA, 25 nt, synthetic construct
  misc_feature 1..25: note = Description of Artificial Sequence: Synthetic oligonucleotide
  source 1..25: mol_type = other RNA
caagtgtccctgtggccctcggcct

SEQ ID NO: 723 - RNA, 25 nt, synthetic construct
  misc_feature 1..25: note = Description of Artificial Sequence: Synthetic oligonucleotide
  source 1..25: mol_type = other RNA
gtccctgtggccctcggcctcggcc

SEQ ID NO: 724 - RNA, 25 nt, synthetic construct
  misc_feature 1..25: note = Description of Artificial Sequence: Synthetic oligonucleotide
  source 1..25: mol_type = other RNA
cctgtggccctcggcctcggccagg

SEQ ID NO: 725 - RNA, 25 nt, synthetic construct
  misc_feature 1..25: note = Description of Artificial Sequence: Synthetic oligonucleotide
  source 1..25: mol_type = other RNA
gtggccgcgcttatgcttctcgccc

SEQ ID NO: 726 - RNA, 25 nt, synthetic construct
  misc_feature 1..25: note = Description of Artificial Sequence: Synthetic oligonucleotide
  source 1..25: mol_type = other RNA
gcgcttatgcttctcgcccaggacc

SEQ ID NO: 727 - RNA, 25 nt, synthetic construct
  misc_feature 1..25: note = Description of Artificial Sequence: Synthetic oligonucleotide
  source 1..25: mol_type = other RNA
cttatgcttctcgcccaggacctgg

SEQ ID NO: 728 - RNA, 25 nt, synthetic construct
  misc_feature 1..25: note = Description of Artificial Sequence: Synthetic oligonucleotide
  source 1..25: mol_type = other RNA
tgcttctcgcccaggacctggtgga

SEQ ID NO: 729 - RNA, 25 nt, synthetic construct
  misc_feature 1..25: note = Description of Artificial Sequence: Synthetic oligonucleotide
  source 1..25: mol_type = other RNA
tggaaggcctcgctgaagtgctgca

SEQ ID NO: 730 - RNA, 25 nt, synthetic construct
  misc_feature 1..25: note = Description of Artificial Sequence: Synthetic oligonucleotide
  source 1..25: mol_type = other RNA
ctgagcaccatgccctgcatgacgt

SEQ ID NO: 731 - RNA, 25 nt, synthetic construct
  misc_feature 1..25: note = Description of Artificial Sequence: Synthetic oligonucleotide
  source 1..25: mol_type = other RNA
tgagcaccatgccctgcatgacgtc

SEQ ID NO: 732 - RNA, 25 nt, synthetic construct
  misc_feature 1..25: note = Description of Artificial Sequence: Synthetic oligonucleotide
  source 1..25: mol_type = other RNA
caccatgccctgcatgacgtcgggc

SEQ ID NO: 733 - RNA, 25 nt, synthetic construct
  misc_feature 1..25: note = Description of Artificial Sequence: Synthetic oligonucleotide
  source 1..25: mol_type = other RNA
accatgccctgcatgacgtcgggca

SEQ ID NO: 734 - RNA, 25 nt, synthetic construct
  misc_feature 1..25: note = Description of Artificial Sequence: Synthetic oligonucleotide
  source 1..25: mol_type = other RNA
gccctgcatgacgtcgggcagggcg

SEQ ID NO: 735 - RNA, 25 nt, synthetic construct
  misc_feature 1..25: note = Description of Artificial Sequence: Synthetic oligonucleotide
  source 1..25: mol_type = other RNA
gaccgcgccccgcgagctgttctcg

SEQ ID NO: 736 - RNA, 25 nt, synthetic construct
  misc_feature 1..25: note = Description of Artificial Sequence: Synthetic oligonucleotide
  source 1..25: mol_type = other RNA
cgcgccccgcgagctgttctcgtgg

SEQ ID NO: 737 - RNA, 25 nt, synthetic construct
  misc_feature 1..25: note = Description of Artificial Sequence: Synthetic oligonucleotide
  source 1..25: mol_type = other RNA
gttctcgtggtggcgcgccgcctcc

SEQ ID NO: 738 - RNA, 25 nt, synthetic construct
  misc_feature 1..25: note = Description of Artificial Sequence: Synthetic oligonucleotide
  source 1..25: mol_type = other RNA
cctcttcctcctcgtccccgttctc

SEQ ID NO: 739 - RNA, 25 nt, synthetic construct
  misc_feature 1..25: note = Description of Artificial Sequence: Synthetic oligonucleotide
  source 1..25: mol_type = other RNA
ctcttcctcctcgtccccgttctcc

SEQ ID NO: 740 - RNA, 25 nt, synthetic construct
  misc_feature 1..25: note = Description of Artificial Sequence: Synthetic oligonucleotide
  source 1..25: mol_type = other RNA
ctcctcgtccccgttctccgggatc

SEQ ID NO: 741 - RNA, 25 nt, synthetic construct
  misc_feature 1..25: note = Description of Artificial Sequence: Synthetic oligonucleotide
  source 1..25: mol_type = other RNA
tcgtccccgttctccgggatcaggt

SEQ ID NO: 742 - RNA, 25 nt, synthetic construct
  misc_feature 1..25: note = Description of Artificial Sequence: Synthetic oligonucleotide
  source 1..25: mol_type = other RNA
cgtccccgttctccgggatcaggtt

SEQ ID NO: 743 - RNA, 25 nt, synthetic construct
  misc_feature 1..25: note = Description of Artificial Sequence: Synthetic oligonucleotide
  source 1..25: mol_type = other RNA
gtccccgttctccgggatcaggttg

SEQ ID NO: 744 - RNA, 25 nt, synthetic construct
  misc_feature 1..25: note = Description of Artificial Sequence: Synthetic oligonucleotide
  source 1..25: mol_type = other RNA
ttggggtcgttctcgctcttgaact

SEQ ID NO: 745 - RNA, 25 nt, synthetic construct
  misc_feature 1..25: note = Description of Artificial Sequence: Synthetic oligonucleotide
  source 1..25: mol_type = other RNA
ttctcgctcttgaacttggccacca

SEQ ID NO: 746 - RNA, 25 nt, synthetic construct
  misc_feature 1..25: note = Description of Artificial Sequence: Synthetic oligonucleotide
  source 1..25: mol_type = other RNA
gccaccacggacttgagcgcgctgc

SEQ ID NO: 747 - RNA, 25 nt, synthetic construct
  misc_feature 1..25: note = Description of Artificial Sequence: Synthetic oligonucleotide
  source 1..25: mol_type = other RNA
ctgctggcgctgcccaccaagtcgc

SEQ ID NO: 748 - RNA, 25 nt, synthetic construct
  misc_feature 1..25: note = Description of Artificial Sequence: Synthetic oligonucleotide
  source 1..25: mol_type = other RNA
gcgctgcccaccaagtcgctggtgc

SEQ ID NO: 749 - RNA, 25 nt, synthetic construct
  misc_feature 1..25: note = Description of Artificial Sequence: Synthetic oligonucleotide
  source 1..25: mol_type = other RNA
cgctgcccaccaagtcgctggtgcc

SEQ ID NO: 750 - RNA, 25 nt, synthetic construct
  misc_feature 1..25: note = Description of Artificial Sequence: Synthetic oligonucleotide
  source 1..25: mol_type = other RNA
ccaccaagtcgctggtgccgggttc

SEQ ID NO: 751 - RNA, 25 nt, synthetic construct
  misc_feature 1..25: note = Description of Artificial Sequence: Synthetic oligonucleotide
  source 1..25: mol_type = other RNA
caccaagtcgctggtgccgggttcc

SEQ ID NO: 752 - RNA, 25 nt, synthetic construct
  misc_feature 1..25: note = Description of Artificial Sequence: Synthetic oligonucleotide
  source 1..25: mol_type = other RNA
accaagtcgctggtgccgggttccg

SEQ ID NO: 753 - RNA, 25 nt, synthetic construct
  misc_feature 1..25: note = Description of Artificial Sequence: Synthetic oligonucleotide
  source 1..25: mol_type = other RNA
tcgctggtgccgggttccggggagc

SEQ ID NO: 754 - RNA, 25 nt, synthetic construct
  misc_feature 1..25: note = Description of Artificial Sequence: Synthetic oligonucleotide
  source 1..25: mol_type = other RNA
ctggtgccgggttccggggagctgg

SEQ ID NO: 755 - RNA, 25 nt, synthetic construct
  misc_feature 1..25: note = Description of Artificial Sequence: Synthetic oligonucleotide
  source 1..25: mol_type = other RNA
gtgccgggttccggggagctggcgg

SEQ ID NO: 756 - RNA, 25 nt, synthetic construct
  misc_feature 1..25: note = Description of Artificial Sequence: Synthetic oligonucleotide
  source 1..25: mol_type = other RNA
gagctggcggtggagagaccgtcgt

SEQ ID NO: 757 - RNA, 25 nt, synthetic construct
  misc_feature 1..25: note = Description of Artificial Sequence: Synthetic oligonucleotide
  source 1..25: mol_type = other RNA
agaccgtcgtcggacttgaccgtca

SEQ ID NO: 758 - RNA, 25 nt, synthetic construct
  misc_feature 1..25: note = Description of Artificial Sequence: Synthetic oligonucleotide
  source 1..25: mol_type = other RNA
gaccgtcgtcggacttgaccgtcat

SEQ ID NO: 759 - RNA, 25 nt, synthetic construct
  misc_feature 1..25: note = Description of Artificial Sequence: Synthetic oligonucleotide
  source 1..25: mol_type = other RNA
accgtcgtcggacttgaccgtcatg

SEQ ID NO: 760 - RNA, 25 nt, synthetic construct
  misc_feature 1..25: note = Description of Artificial Sequence: Synthetic oligonucleotide
  source 1..25: mol_type = other RNA
ccgtcgtcggacttgaccgtcatgg

SEQ ID NO: 761 - RNA, 25 nt, synthetic construct
  misc_feature 1..25: note = Description of Artificial Sequence: Synthetic oligonucleotide
  source 1..25: mol_type = other RNA
cgatttgtgcatgtgcgtcttcatg

SEQ ID NO: 762 - RNA, 25 nt, synthetic construct
  misc_feature 1..25: note = Description of Artificial Sequence: Synthetic oligonucleotide
  source 1..25: mol_type = other RNA
gtcttcatgtggcgcttcagcttgc

SEQ ID NO: 763 - RNA, 25 nt, synthetic construct
  misc_feature 1..25: note = Description of Artificial Sequence: Synthetic oligonucleotide
  source 1..25: mol_type = other RNA
catgtggcgcttcagcttgctggcc

SEQ ID NO: 764 - RNA, 25 nt, synthetic construct
  misc_feature 1..25: note = Description of Artificial Sequence: Synthetic oligonucleotide
  source 1..25: mol_type = other RNA
atgtggcgcttcagcttgctggcct

SEQ ID NO: 765 - RNA, 25 nt, synthetic construct
  misc_feature 1..25: note = Description of Artificial Sequence: Synthetic oligonucleotide
  source 1..25: mol_type = other RNA
cagcttgctggcctgggtgcacgcg

SEQ ID NO: 766 - RNA, 25 nt, synthetic construct
  misc_feature 1..25: note = Description of Artificial Sequence: Synthetic oligonucleotide
  source 1..25: mol_type = other RNA
ggcctgggtgcacgcgtggtcgcac

SEQ ID NO: 767 - RNA, 25 nt, synthetic construct
  misc_feature 1..25: note = Description of Artificial Sequence: Synthetic oligonucleotide
  source 1..25: mol_type = other RNA
gcgtggtcgcacaggttgcacttgt

SEQ ID NO: 768 - RNA, 25 nt, synthetic construct
  misc_feature 1..25: note = Description of Artificial Sequence: Synthetic oligonucleotide
  source 1..25: mol_type = other RNA
cgtggtcgcacaggttgcacttgta

SEQ ID NO: 769 - RNA, 25 nt, synthetic construct
  misc_feature 1..25: note = Description of Artificial Sequence: Synthetic oligonucleotide
  source 1..25: mol_type = other RNA
gcacttgtagggcttctcgcccgtg

SEQ ID NO: 770 - RNA, 25 nt, synthetic construct
  misc_feature 1..25: note = Description of Artificial Sequence: Synthetic oligonucleotide
  source 1..25: mol_type = other RNA
gggcttctcgcccgtgtggctgcgc

SEQ ID NO: 771 - RNA, 25 nt, synthetic construct
  misc_feature 1..25: note = Description of Artificial Sequence: Synthetic oligonucleotide
  source 1..25: mol_type = other RNA
cgtgtggctgcgccggtgcaccacc

SEQ ID NO: 772 - RNA, 25 nt, synthetic construct
  misc_feature 1..25: note = Description of Artificial Sequence: Synthetic oligonucleotide
  source 1..25: mol_type = other RNA
gtcttgccgcagaactcgcatgact

SEQ ID NO: 773 - RNA, 25 nt, synthetic construct
  misc_feature 1..25: note = Description of Artificial Sequence: Synthetic oligonucleotide
  source 1..25: mol_type = other RNA
agaactcgcatgacttggacttgac

SEQ ID NO: 774 - RNA, 25 nt, synthetic construct
  misc_feature 1..25: note = Description of Artificial Sequence: Synthetic oligonucleotide
  source 1..25: mol_type = other RNA
gaactcgcatgacttggacttgacc

SEQ ID NO: 775 - RNA, 25 nt, synthetic construct
  misc_feature 1..25: note = Description of Artificial Sequence: Synthetic oligonucleotide
  source 1..25: mol_type = other RNA
aactcgcatgacttggacttgaccg

SEQ ID NO: 776 - RNA, 25 nt, synthetic construct
  misc_feature 1..25: note = Description of Artificial Sequence: Synthetic oligonucleotide
  source 1..25: mol_type = other RNA
actcgcatgacttggacttgaccgg

SEQ ID NO: 777 - RNA, 25 nt, synthetic construct
  misc_feature 1..25: note = Description of Artificial Sequence: Synthetic oligonucleotide
  source 1..25: mol_type = other RNA
gcatgacttggacttgaccgggggc

SEQ ID NO: 778 - RNA, 25 nt, synthetic construct
  misc_feature 1..25: note = Description of Artificial Sequence: Synthetic oligonucleotide
  source 1..25: mol_type = other RNA
catgacttggacttgaccgggggct

SEQ ID NO: 779 - RNA, 25 nt, synthetic construct
  misc_feature 1..25: note = Description of Artificial Sequence: Synthetic oligonucleotide
  source 1..25: mol_type = other RNA
gacttggacttgaccgggggctggg

SEQ ID NO: 780 - RNA, 25 nt, synthetic construct
  misc_feature 1..25: note = Description of Artificial Sequence: Synthetic oligonucleotide
  source 1..25: mol_type = other RNA
acttggacttgaccgggggctggga

SEQ ID NO: 781 - RNA, 25 nt, synthetic construct
  misc_feature 1..25: note = Description of Artificial Sequence: Synthetic oligonucleotide
  source 1..25: mol_type = other RNA
tggacttgaccgggggctgggaggg

SEQ ID NO: 782 - RNA, 25 nt, synthetic construct
  misc_feature 1..25: note = Description of Artificial Sequence: Synthetic oligonucleotide
  source 1..25: mol_type = other RNA
acttgaccgggggctgggagggagg

SEQ ID NO: 783 - RNA, 25 nt, synthetic construct
  misc_feature 1..25: note = Description of Artificial Sequence: Synthetic oligonucleotide
  source 1..25: mol_type = other RNA
cttgaccgggggctgggagggagga

SEQ ID NO: 784 - RNA, 25 nt, synthetic construct
  misc_feature 1..25: note = Description of Artificial Sequence: Synthetic oligonucleotide
  source 1..25: mol_type = other RNA
ttgaccgggggctgggagggaggag

SEQ ID NO: 785 - RNA, 25 nt, synthetic construct
  misc_feature 1..25: note = Description of Artificial Sequence: Synthetic oligonucleotide
  source 1..25: mol_type = other RNA
accgggggctgggagggaggagggg

SEQ ID NO: 786 - RNA, 25 nt, synthetic construct
  misc_feature 1..25: note = Description of Artificial Sequence: Synthetic oligonucleotide
  source 1..25: mol_type = other RNA
gggagggaggaggggcggattgcag

SEQ ID NO: 787 - RNA, 25 nt, synthetic construct
  misc_feature 1..25: note = Description of Artificial Sequence: Synthetic oligonucleotide
  source 1..25: mol_type = other RNA
agggaggaggggcggattgcagagg

SEQ ID NO: 788 - RNA, 25 nt, synthetic construct
  misc_feature 1..25: note = Description of Artificial Sequence: Synthetic oligonucleotide
  source 1..25: mol_type = other RNA
gggaggaggggcggattgcagagga

SEQ ID NO: 789 - RNA, 25 nt, synthetic construct
  misc_feature 1..25: note = Description of Artificial Sequence: Synthetic oligonucleotide
  source 1..25: mol_type = other RNA
aggaggggcggattgcagaggaggg

SEQ ID NO: 790 - RNA, 25 nt, synthetic construct
  misc_feature 1..25: note = Description of Artificial Sequence: Synthetic oligonucleotide
  source 1..25: mol_type = other RNA
ggaggggcggattgcagaggaggga

SEQ ID NO: 791 - RNA, 25 nt, synthetic construct
  misc_feature 1..25: note = Description of Artificial Sequence: Synthetic oligonucleotide
  source 1..25: mol_type = other RNA
gaggggcggattgcagaggagggag

SEQ ID NO: 792 - RNA, 25 nt, synthetic construct
  misc_feature 1..25: note = Description of Artificial Sequence: Synthetic oligonucleotide
  source 1..25: mol_type = other RNA
aggggcggattgcagaggagggagg

SEQ ID NO: 793 - RNA, 25 nt, synthetic construct
  misc_feature 1..25: note = Description of Artificial Sequence: Synthetic oligonucleotide
  source 1..25: mol_type = other RNA
ggggcggattgcagaggagggaggg

SEQ ID NO: 794 - RNA, 25 nt, synthetic construct
  misc_feature 1..25: note = Description of Artificial Sequence: Synthetic oligonucleotide
  source 1..25: mol_type = other RNA
gggcggattgcagaggagggagggg

SEQ ID NO: 795 - RNA, 25 nt, synthetic construct
  misc_feature 1..25: note = Description of Artificial Sequence: Synthetic oligonucleotide
  source 1..25: mol_type = other RNA
cagaggagggagggggggcgtcgcc

SEQ ID NO: 796 - RNA, 25 nt, synthetic construct
  misc_feature 1..25: note = Description of Artificial Sequence: Synthetic oligonucleotide
  source 1..25: mol_type = other RNA
ggagggagggggggcgtcgccagga

SEQ ID NO: 797 - RNA, 25 nt, synthetic construct
  misc_feature 1..25: note = Description of Artificial Sequence: Synthetic oligonucleotide
  source 1..25: mol_type = other RNA
gagggagggggggcgtcgccaggaa

SEQ ID NO: 798 - RNA, 25 nt, synthetic construct
  misc_feature 1..25: note = Description of Artificial Sequence: Synthetic oligonucleotide
  source 1..25: mol_type = other RNA
ggagggggggcgtcgccaggaaggg

SEQ ID NO: 799 - RNA, 25 nt, synthetic construct
  misc_feature 1..25: note = Description of Artificial Sequence: Synthetic oligonucleotide
  source 1..25: mol_type = other RNA
tcgccaggaagggcggcttgctacc

SEQ ID NO: 800 - RNA, 25 nt, synthetic construct
  misc_feature 1..25: note = Description of Artificial Sequence: Synthetic oligonucleotide
  source 1..25: mol_type = other RNA
caggaagggcggcttgctacctggc

SEQ ID NO: 801 - RNA, 25 nt, synthetic construct
  misc_feature 1..25: note = Description of Artificial Sequence: Synthetic oligonucleotide
  source 1..25: mol_type = other RNA
agggcggcttgctacctggctggaa

SEQ ID NO: 802 - RNA, 25 nt, synthetic construct
  misc_feature 1..25: note = Description of Artificial Sequence: Synthetic oligonucleotide
  source 1..25: mol_type = other RNA
ggaatggttgcagtaacctttgcat

SEQ ID NO: 803 - RNA, 25 nt, synthetic construct
  misc_feature 1..25: note = Description of Artificial Sequence: Synthetic oligonucleotide
  source 1..25: mol_type = other RNA
gaatggttgcagtaacctttgcata

SEQ ID NO: 804 - RNA, 25 nt, synthetic construct
  misc_feature 1..25: note = Description of Artificial Sequence: Synthetic oligonucleotide
  source 1..25: mol_type = other RNA
ggttgcagtaacctttgcatagggc

SEQ ID NO: 805 - RNA, 25 nt, synthetic construct
  misc_feature 1..25: note = Description of Artificial Sequence: Synthetic oligonucleotide
  source 1..25: mol_type = other RNA
gttgcagtaacctttgcatagggct

SEQ ID NO: 806 - RNA, 25 nt, synthetic construct
  misc_feature 1..25: note = Description of Artificial Sequence: Synthetic oligonucleotide
  source 1..25: mol_type = other RNA
cagtaacctttgcatagggctgggc

SEQ ID NO: 807 - RNA, 25 nt, synthetic construct
  misc_feature 1..25: note = Description of Artificial Sequence: Synthetic oligonucleotide
  source 1..25: mol_type = other RNA
acctttgcatagggctgggccggcc

SEQ ID NO: 808 - RNA, 25 nt, synthetic construct
  misc_feature 1..25: note = Description of Artificial Sequence: Synthetic oligonucleotide
  source 1..25: mol_type = other RNA
cctttgcatagggctgggccggcct

SEQ ID NO: 809 - RNA, 25 nt, synthetic construct
  misc_feature 1..25: note = Description of Artificial Sequence: Synthetic oligonucleotide
  source 1..25: mol_type = other RNA
ctttgcatagggctgggccggcctg

SEQ ID NO: 810 - RNA, 25 nt, synthetic construct
  misc_feature 1..25: note = Description of Artificial Sequence: Synthetic oligonucleotide
  source 1..25: mol_type = other RNA
tagggctgggccggcctggggacag

SEQ ID NO: 811 - RNA, 25 nt, synthetic construct
  misc_feature 1..25: note = Description of Artificial Sequence: Synthetic oligonucleotide
  source 1..25: mol_type = other RNA
ggctgggccggcctggggacagcgg

SEQ ID NO: 812 - RNA, 25 nt, synthetic construct
  misc_feature 1..25: note = Description of Artificial Sequence: Synthetic oligonucleotide
  source 1..25: mol_type = other RNA
gctgggccggcctggggacagcggt

SEQ ID NO: 813 - RNA, 25 nt, synthetic construct
  misc_feature 1..25: note = Description of Artificial Sequence: Synthetic oligonucleotide
  source 1..25: mol_type = other RNA
tctctaagtctcctagagaaatcca

SEQ ID NO: 814 - RNA, 25 nt, synthetic construct
  misc_feature 1..25: note = Description of Artificial Sequence: Synthetic oligonucleotide
  source 1..25: mol_type = other RNA
ctaagtctcctagagaaatccatgg

SEQ ID NO: 815 - RNA, 25 nt, synthetic construct
  misc_feature 1..25: note = Description of Artificial Sequence: Synthetic oligonucleotide
  source 1..25: mol_type = other RNA
taagtctcctagagaaatccatggc

SEQ ID NO: 816 - RNA, 25 nt, synthetic construct
  misc_feature 1..25: note = Description of Artificial Sequence: Synthetic oligonucleotide
  source 1..25: mol_type = other RNA
gtctcctagagaaatccatggcggg

SEQ ID NO: 817 - RNA, 25 nt, synthetic construct
  misc_feature 1..25: note = Description of Artificial Sequence: Synthetic oligonucleotide
  source 1..25: mol_type = other RNA
ccatggcgggaggctccatagccat

SEQ ID NO: 818 - RNA, 25 nt, synthetic construct
  misc_feature 1..25: note = Description of Artificial Sequence: Synthetic oligonucleotide
  source 1..25: mol_type = other RNA
ggattcaaccgcagcaccctgtcaa

SEQ ID NO: 819 - RNA, 25 nt, synthetic construct
  misc_feature 1..25: note = Description of Artificial Sequence: Synthetic oligonucleotide
  source 1..25: mol_type = other RNA
accgcagcaccctgtcaaaggcact

SEQ ID NO: 820 - RNA, 25 nt, synthetic construct
  misc_feature 1..25: note = Description of Artificial Sequence: Synthetic oligonucleotide
  source 1..25: mol_type = other RNA
ccgcagcaccctgtcaaaggcactc

SEQ ID NO: 821 - RNA, 25 nt, synthetic construct
  misc_feature 1..25: note = Description of Artificial Sequence: Synthetic oligonucleotide
  source 1..25: mol_type = other RNA
caccctgtcaaaggcactcgggtga

SEQ ID NO: 822 - RNA, 25 nt, synthetic construct
  misc_feature 1..25: note = Description of Artificial Sequence: Synthetic oligonucleotide
  source 1..25: mol_type = other RNA
accctgtcaaaggcactcgggtgat

SEQ ID NO: 823 - RNA, 25 nt, synthetic construct
  misc_feature 1..25: note = Description of Artificial Sequence: Synthetic oligonucleotide
  source 1..25: mol_type = other RNA
ctgtcaaaggcactcgggtgatggg

SEQ ID NO: 824 - RNA, 25 nt, synthetic construct
  misc_feature 1..25: note = Description of Artificial Sequence: Synthetic oligonucleotide
  source 1..25: mol_type = other RNA
aaaggcactcgggtgatgggtggcc

SEQ ID NO: 825 - RNA, 25 nt, synthetic construct
  misc_feature 1..25: note = Description of Artificial Sequence: Synthetic oligonucleotide
  source 1..25: mol_type = other RNA
aaggcactcgggtgatgggtggcca

SEQ ID NO: 826 - RNA, 25 nt, synthetic construct
  misc_feature 1..25: note = Description of Artificial Sequence: Synthetic oligonucleotide
  source 1..25: mol_type = other RNA
ggccagggccatctcttccgccccc

SEQ ID NO: 827 - RNA, 25 nt, synthetic construct
  misc_feature 1..25: note = Description of Artificial Sequence: Synthetic oligonucleotide
  source 1..25: mol_type = other RNA
ctcttccgcccccaggcgctctatg

SEQ ID NO: 828 - RNA, 25 nt, synthetic construct
  misc_feature 1..25: note = Description of Artificial Sequence: Synthetic oligonucleotide
  source 1..25: mol_type = other RNA
ttccgcccccaggcgctctatgcgg

SEQ ID NO: 829 - RNA, 25 nt, synthetic construct
  misc_feature 1..25: note = Description of Artificial Sequence: Synthetic oligonucleotide
  source 1..25: mol_type = other RNA
tccgcccccaggcgctctatgcggt

SEQ ID NO: 830 - RNA, 25 nt, synthetic construct
  misc_feature 1..25: note = Description of Artificial Sequence: Synthetic oligonucleotide
  source 1..25: mol_type = other RNA
ccgcccccaggcgctctatgcggtg

SEQ ID NO: 831 - RNA, 25 nt, synthetic construct
  misc_feature 1..25: note = Description of Artificial Sequence: Synthetic oligonucleotide
  source 1..25: mol_type = other RNA
cgcccccaggcgctctatgcggtgg

SEQ ID NO: 832 - RNA, 25 nt, synthetic construct
  misc_feature 1..25: note = Description of Artificial Sequence: Synthetic oligonucleotide
  source 1..25: mol_type = other RNA
tgcggtgggggtccaagtgatgtct

SEQ ID NO: 833 - RNA, 25 nt, synthetic construct
  misc_feature 1..25: note = Description of Artificial Sequence: Synthetic oligonucleotide
  source 1..25: mol_type = other RNA
ggtgggggtccaagtgatgtctcgg

SEQ ID NO: 834 - RNA, 25 nt, synthetic construct
  misc_feature 1..25: note = Description of Artificial Sequence: Synthetic oligonucleotide
  source 1..25: mol_type = other RNA
gggggtccaagtgatgtctcggtgg

SEQ ID NO: 835 - RNA, 25 nt, synthetic construct
  misc_feature 1..25: note = Description of Artificial Sequence: Synthetic oligonucleotide
  source 1..25: mol_type = other RNA
gtgatgtctcggtggtggactaaac

SEQ ID NO: 836 - RNA, 25 nt, synthetic construct
  misc_feature 1..25: note = Description of Artificial Sequence: Synthetic oligonucleotide
  source 1..25: mol_type = other RNA
tgatgtctcggtggtggactaaaca

SEQ ID NO: 837 - RNA, 25 nt, synthetic construct
  misc_feature 1..25: note = Description of Artificial Sequence: Synthetic oligonucleotide
  source 1..25: mol_type = other RNA
gatgtctcggtggtggactaaacag

SEQ ID NO: 838 - RNA, 25 nt, synthetic construct
  misc_feature 1..25: note = Description of Artificial Sequence: Synthetic oligonucleotide
  source 1..25: mol_type = other RNA
atgtctcggtggtggactaaacagg

SEQ ID NO: 839 - RNA, 25 nt, synthetic construct
  misc_feature 1..25: note = Description of Artificial Sequence: Synthetic oligonucleotide
  source 1..25: mol_type = other RNA
tgtctcggtggtggactaaacaggg

SEQ ID NO: 840 - RNA, 25 nt, synthetic construct
  misc_feature 1..25: note = Description of Artificial Sequence: Synthetic oligonucleotide
  source 1..25: mol_type = other RNA
gtctcggtggtggactaaacagggg

SEQ ID NO: 841 - RNA, 25 nt, synthetic construct
  misc_feature 1..25: note = Description of Artificial Sequence: Synthetic oligonucleotide
  source 1..25: mol_type = other RNA
ggtggtggactaaacagggggggag

SEQ ID NO: 842 - RNA, 25 nt, synthetic construct
  misc_feature 1..25: note = Description of Artificial Sequence: Synthetic oligonucleotide
  source 1..25: mol_type = other RNA
gtggtggactaaacagggggggagt

SEQ ID NO: 843 - RNA, 25 nt, synthetic construct
  misc_feature 1..25: note = Description of Artificial Sequence: Synthetic oligonucleotide
  source 1..25: mol_type = other RNA
gtggactaaacagggggggagtggg

SEQ ID NO: 844 - RNA, 25 nt, synthetic construct
  misc_feature 1..25: note = Description of Artificial Sequence: Synthetic oligonucleotide
  source 1..25: mol_type = other RNA
agtgggtggaaagcgcccttctgcc

SEQ ID NO: 845 - RNA, 25 nt, synthetic construct
  misc_feature 1..25: note = Description of Artificial Sequence: Synthetic oligonucleotide
  source 1..25: mol_type = other RNA
ggtggaaagcgcccttctgccaggc

SEQ ID NO: 846 - RNA, 25 nt, synthetic construct
  misc_feature 1..25: note = Description of Artificial Sequence: Synthetic oligonucleotide
  source 1..25: mol_type = other RNA
cggaagcctctctcgatactgatcc

SEQ ID NO: 847 - RNA, 25 nt, synthetic construct
  misc_feature 1..25: note = Description of Artificial Sequence: Synthetic oligonucleotide
  source 1..25: mol_type = other RNA
cgatactgatcctggtattcttagc

SEQ ID NO: 848 - RNA, 25 nt, synthetic construct
  misc_feature 1..25: note = Description of Artificial Sequence: Synthetic oligonucleotide
  source 1..25: mol_type = other RNA
gatcctggtattcttagcaggttaa

SEQ ID NO: 849 - RNA, 25 nt, synthetic construct
  misc_feature 1..25: note = Description of Artificial Sequence: Synthetic oligonucleotide
  source 1..25: mol_type = other RNA
atcctggtattcttagcaggttaaa

SEQ ID NO: 850 - RNA, 25 nt, synthetic construct
  misc_feature 1..25: note = Description of Artificial Sequence: Synthetic oligonucleotide
  source 1..25: mol_type = other RNA
tcctggtattcttagcaggttaaag

SEQ ID NO: 851 - RNA, 25 nt, synthetic construct
  misc_feature 1..25: note = Description of Artificial Sequence: Synthetic oligonucleotide
  source 1..25: mol_type = other RNA
gttattgtctgcaatatgaatccca

SEQ ID NO: 852 - RNA, 25 nt, synthetic construct
  misc_feature 1..25: note = Description of Artificial Sequence: Synthetic oligonucleotide
  source 1..25: mol_type = other RNA
tgtctgcaatatgaatcccatggag

SEQ ID NO: 853 - RNA, 25 nt, synthetic construct
  misc_feature 1..25: note = Description of Artificial Sequence: Synthetic oligonucleotide
  source 1..25: mol_type = other RNA
ctgcaatatgaatcccatggagagg

SEQ ID NO: 854 - RNA, 25 nt, synthetic construct
  misc_feature 1..25: note = Description of Artificial Sequence: Synthetic oligonucleotide
  source 1..25: mol_type = other RNA
aatatgaatcccatggagaggtggc

SEQ ID NO: 855 - RNA, 25 nt, synthetic construct
  misc_feature 1..25: note = Description of Artificial Sequence: Synthetic oligonucleotide
  source 1..25: mol_type = other RNA
atatgaatcccatggagaggtggct

SEQ ID NO: 856 - RNA, 25 nt, synthetic construct
  misc_feature 1..25: note = Description of Artificial Sequence: Synthetic oligonucleotide
  source 1..25: mol_type = other RNA
gaatcccatggagaggtggctggga

SEQ ID NO: 857 - RNA, 25 nt, synthetic construct
  misc_feature 1..25: note = Description of Artificial Sequence: Synthetic oligonucleotide
  source 1..25: mol_type = other RNA
aaggacattctgcacctagtcctga

SEQ ID NO: 858 - RNA, 25 nt, synthetic construct
  misc_feature 1..25: note = Description of Artificial Sequence: Synthetic oligonucleotide
  source 1..25: mol_type = other RNA
aggacattctgcacctagtcctgaa

SEQ ID NO: 859 - RNA, 25 nt, synthetic construct
  misc_feature 1..25: note = Description of Artificial Sequence: Synthetic oligonucleotide
  source 1..25: mol_type = other RNA
ctagtcctgaagggataccaacccg

SEQ ID NO: 860 - RNA, 25 nt, synthetic construct
  misc_feature 1..25: note = Description of Artificial Sequence: Synthetic oligonucleotide
  source 1..25: mol_type = other RNA
tagtcctgaagggataccaacccgc

SEQ ID NO: 861 - RNA, 25 nt, synthetic construct
  misc_feature 1..25: note = Description of Artificial Sequence: Synthetic oligonucleotide
  source 1..25: mol_type = other RNA
agtcctgaagggataccaacccgcg

SEQ ID NO: 862 - RNA, 25 nt, synthetic construct
  misc_feature 1..25: note = Description of Artificial Sequence: Synthetic oligonucleotide
  source 1..25: mol_type = other RNA
tgaagggataccaacccgcggggtc

SEQ ID NO: 863 - RNA, 25 nt, synthetic construct
  misc_feature 1..25: note = Description of Artificial Sequence: Synthetic oligonucleotide
  source 1..25: mol_type = other RNA
gaagggataccaacccgcggggtca

SEQ ID NO: 864 - RNA, 25 nt, synthetic construct
  misc_feature 1..25: note = Description of Artificial Sequence: Synthetic oligonucleotide
  source 1..25: mol_type = other RNA
aagggataccaacccgcggggtcag

SEQ ID NO: 865 - RNA, 25 nt, synthetic construct
  misc_feature 1..25: note = Description of Artificial Sequence: Synthetic oligonucleotide
  source 1..25: mol_type = other RNA
gcgtgttgcaagagaaaccatgcac

SEQ ID NO: 866 - RNA, 25 nt, synthetic construct
  misc_feature 1..25: note = Description of Artificial Sequence: Synthetic oligonucleotide
  source 1..25: mol_type = other RNA
gcaagagaaaccatgcactggtgaa

SEQ ID NO: 867 - RNA, 25 nt, synthetic construct
  misc_feature 1..25: note = Description of Artificial Sequence: Synthetic oligonucleotide
  source 1..25: mol_type = other RNA
ttgcaagttgtacatgtgtagctgc

SEQ ID NO: 868 - RNA, 25 nt, synthetic construct
  misc_feature 1..25: note = Description of Artificial Sequence: Synthetic oligonucleotide
  source 1..25: mol_type = other RNA
tgcaagttgtacatgtgtagctgct

SEQ ID NO: 869 - RNA, 25 nt, synthetic construct
  misc_feature 1..25: note = Description of Artificial Sequence: Synthetic oligonucleotide
  source 1..25: mol_type = other RNA
ggaaaaaccactgtctgtgtttttt

SEQ ID NO: 870 - RNA, 25 nt, synthetic construct
  misc_feature 1..25: note = Description of Artificial Sequence: Synthetic oligonucleotide
  source 1..25: mol_type = other RNA
gtttctggtctttgttaagttctat

SEQ ID NO: 871 - RNA, 25 nt, synthetic construct
  misc_feature 1..25: note = Description of Artificial Sequence: Synthetic oligonucleotide
  source 1..25: mol_type = other RNA
cctggctttttattgtatttgtttc

SEQ ID NO: 872 - RNA, 25 nt, synthetic construct
  misc_feature 1..25: note = Description of Artificial Sequence: Synthetic oligonucleotide
  source 1..25: mol_type = other RNA
aagatgaccaaaggtcattacaacc

SEQ ID NO: 873 - RNA, 25 nt, synthetic construct
  misc_feature 1..25: note = Description of Artificial Sequence: Synthetic oligonucleotide
  source 1..25: mol_type = other RNA
aaaaaaaaaaataaaagatgaccaa

SEQ ID NO: 874 - RNA, 25 nt, synthetic construct
  misc_feature 1..25: note = Description of Artificial Sequence: Synthetic oligonucleotide
  source 1..25: mol_type = other RNA
tgcttatgtgccctgttcaaaacag

SEQ ID NO: 875 - RNA, 25 nt, synthetic construct
  misc_feature 1..25: note = Description of Artificial Sequence: Synthetic oligonucleotide
  source 1..25: mol_type = other RNA
aacttgaaattttatcttttactat

SEQ ID NO: 876 - RNA, 25 nt, synthetic construct
  misc_feature 1..25: note = Description of Artificial Sequence: Synthetic oligonucleotide
  source 1..25: mol_type = other RNA
taacttgaaattttatcttttacta

SEQ ID NO: 877 - RNA, 25 nt, synthetic construct
  misc_feature 1..25: note = Description of Artificial Sequence: Synthetic oligonucleotide
  source 1..25: mol_type = other RNA
atggcaatgcagaatattttgttat

SEQ ID NO: 878 - RNA, 25 nt, synthetic construct
  misc_feature 1..25: note = Description of Artificial Sequence: Synthetic oligonucleotide
  source 1..25: mol_type = other RNA
gctttagtcaatacttttttgtaaa

SEQ ID NO: 879 - RNA, 25 nt, synthetic construct
  misc_feature 1..25: note = Description of Artificial Sequence: Synthetic oligonucleotide
  source 1..25: mol_type = other RNA
actaaatggtgctttatatttagat

SEQ ID NO: 880 - RNA, 25 nt, synthetic construct
  misc_feature 1..25: note = Description of Artificial Sequence: Synthetic oligonucleotide
  source 1..25: mol_type = other RNA
gtttttttcattgccaaaaactaaa

SEQ ID NO: 881 - RNA, 25 nt, synthetic construct
  misc_feature 1..25: note = Description of Artificial Sequence: Synthetic oligonucleotide
  source 1..25: mol_type = other RNA
atgcagtactgcaagctaataacgt

SEQ ID NO: 882 - RNA, 25 nt, synthetic construct
  misc_feature 1..25: note = Description of Artificial Sequence: Synthetic oligonucleotide
  source 1..25: mol_type = other RNA
aatgtcacatggatggctgtcatag

SEQ ID NO: 883 - RNA, 25 nt, synthetic construct
  misc_feature 1..25: note = Description of Artificial Sequence: Synthetic oligonucleotide
  source 1..25: mol_type = other RNA
gaatgtcacatggatggctgtcata

SEQ ID NO: 884 - RNA, 25 nt, synthetic construct
  misc_feature 1..25: note = Description of Artificial Sequence: Synthetic oligonucleotide
  source 1..25: mol_type = other RNA
agaatgtcacatggatggctgtcat

SEQ ID NO: 885 - RNA, 25 nt, synthetic construct
  misc_feature 1..25: note = Description of Artificial Sequence: Synthetic oligonucleotide
  source 1..25: mol_type = other RNA
ggagcctgctagaatgtcacatgga

SEQ ID NO: 886 - RNA, 25 nt, synthetic construct
  misc_feature 1..25: note = Description of Artificial Sequence: Synthetic oligonucleotide
  source 1..25: mol_type = other RNA
tgggggagcctgctagaatgtcaca

SEQ ID NO: 887 - RNA, 25 nt, synthetic construct
  misc_feature 1..25: note = Description of Artificial Sequence: Synthetic oligonucleotide
  source 1..25: mol_type = other RNA
gagaagccatataatggcggtttgg

SEQ ID NO: 888 - RNA, 25 nt, synthetic construct
  misc_feature 1..25: note = Description of Artificial Sequence: Synthetic oligonucleotide
  source 1..25: mol_type = other RNA
tgagaagccatataatggcggtttg

SEQ ID NO: 889 - RNA, 25 nt, synthetic construct
  misc_feature 1..25: note = Description of Artificial Sequence: Synthetic oligonucleotide
  source 1..25: mol_type = other RNA
atgagaagccatataatggcggttt

SEQ ID NO: 890 - RNA, 25 nt, synthetic construct
  misc_feature 1..25: note = Description of Artificial Sequence: Synthetic oligonucleotide
  source 1..25: mol_type = other RNA
gatgagaagccatataatggcggtt

SEQ ID NO: 891 - RNA, 25 nt, synthetic construct
  misc_feature 1..25: note = Description of Artificial Sequence: Synthetic oligonucleotide
  source 1..25: mol_type = other RNA
ttacagatgagaagccatataatgg

SEQ ID NO: 892 - RNA, 25 nt, synthetic construct
  misc_feature 1..25: note = Description of Artificial Sequence: Synthetic oligonucleotide
  source 1..25: mol_type = other RNA
acattacagatgagaagccatataa

SEQ ID NO: 893 - RNA, 25 nt, synthetic construct
  misc_feature 1..25: note = Description of Artificial Sequence: Synthetic oligonucleotide
  source 1..25: mol_type = other RNA
ccacagtatatttttttaatttggc

SEQ ID NO: 894 - RNA, 25 nt, synthetic construct
  misc_feature 1..25: note = Description of Artificial Sequence: Synthetic oligonucleotide
  source 1..25: mol_type = other RNA
gctgccacagtatatttttttaatt

SEQ ID NO: 895 - RNA, 25 nt, synthetic construct
  misc_feature 1..25: note = Description of Artificial Sequence: Synthetic oligonucleotide
  source 1..25: mol_type = other RNA
ttttggtagtggaaaaaaaaaagac

SEQ ID NO: 896 - RNA, 25 nt, synthetic construct
  misc_feature 1..25: note = Description of Artificial Sequence: Synthetic oligonucleotide
  source 1..25: mol_type = other RNA
ggtatcaatgtaccttttttggtag

SEQ ID NO: 897 - RNA, 25 nt, synthetic construct
  misc_feature 1..25: note = Description of Artificial Sequence: Synthetic oligonucleotide
  source 1..25: mol_type = other RNA
ttaaaaggtatcaatgtaccttttt

SEQ ID NO: 898 - RNA, 25 nt, synthetic construct
  misc_feature 1..25: note = Description of Artificial Sequence: Synthetic oligonucleotide
  source 1..25: mol_type = other RNA
tttaactgttgcttgttctcttaaa

SEQ ID NO: 899 - RNA, 25 nt, synthetic construct
  misc_feature 1..25: note = Description of Artificial Sequence: Synthetic oligonucleotide
  source 1..25: mol_type = other RNA
ttgaattaaatgttcatctagtgtt

SEQ ID NO: 900 - RNA, 25 nt, synthetic construct
  misc_feature 1..25: note = Description of Artificial Sequence: Synthetic oligonucleotide
  source 1..25: mol_type = other RNA
tggtcttttttctgtatttctagaa

SEQ ID NO: 901 - RNA, 25 nt, synthetic construct
  misc_feature 1..25: note = Description of Artificial Sequence: Synthetic oligonucleotide
  source 1..25: mol_type = other RNA
tgattcctatgctaaaatacattta

SEQ ID NO: 902 - RNA, 25 nt, synthetic construct
  misc_feature 1..25: note = Description of Artificial Sequence: Synthetic oligonucleotide
  source 1..25: mol_type = other RNA
ttaagattatatagtacttaaatat

SEQ ID NO: 903 - RNA, 25 nt, synthetic construct
  misc_feature 1..25: note = Description of Artificial Sequence: Synthetic oligonucleotide
  source 1..25: mol_type = other RNA
aaaaaaaaaaacatacattggggaa

SEQ ID NO: 904 - RNA, 25 nt, synthetic construct
  misc_feature 1..25: note = Description of Artificial Sequence: Synthetic oligonucleotide
  source 1..25: mol_type = other RNA
ttgtaaaaaaaaaaaacatacattg

SEQ ID NO: 905 - RNA, 25 nt, synthetic construct
  misc_feature 1..25: note = Description of Artificial Sequence: Synthetic oligonucleotide
  source 1..25: mol_type = other RNA
gttgtaaaaaaaaaaaacatacatt

SEQ ID NO: 906 - RNA, 25 nt, synthetic construct
  misc_feature 1..25: note = Description of Artificial Sequence: Synthetic oligonucleotide
  source 1..25: mol_type = other RNA
ggttgtaaaaaaaaaaaacatacat

SEQ ID NO: 907 - RNA, 25 nt, synthetic construct
  misc_feature 1..25: note = Description of Artificial Sequence: Synthetic oligonucleotide
  source 1..25: mol_type = other RNA
atgccttggatacacaccgctcttc

SEQ ID NO: 908 - RNA, 25 nt, synthetic construct
  misc_feature 1..25: note = Description of Artificial Sequence: Synthetic oligonucleotide
  source 1..25: mol_type = other RNA
aaatggtagtggaaattctatgcct

SEQ ID NO: 909 - RNA, 25 nt, synthetic construct
  misc_feature 1..25: note = Description of Artificial Sequence: Synthetic oligonucleotide
  source 1..25: mol_type = other RNA
cttgttatccatttaaaaatggtag

SEQ ID NO: 910 - RNA, 25 nt, synthetic construct
  misc_feature 1..25: note = Description of Artificial Sequence: Synthetic oligonucleotide
  source 1..25: mol_type = other RNA
acaagacttgttatccatttaaaaa

SEQ ID NO: 911 - RNA, 25 nt, synthetic construct
  misc_feature 1..25: note = Description of Artificial Sequence: Synthetic oligonucleotide
  source 1..25: mol_type = other RNA
gcattttagggttccattgtcttgg

SEQ ID NO: 912 - RNA, 25 nt, synthetic construct
  misc_feature 1..25: note = Description of Artificial Sequence: Synthetic oligonucleotide
  source 1..25: mol_type = other RNA
actgcattttagggttccattgtct

SEQ ID NO: 913 - RNA, 25 nt, synthetic construct
  misc_feature 1..25: note = Description of Artificial Sequence: Synthetic oligonucleotide
  source 1..25: mol_type = other RNA
atgtttaggggggaactgcatttta

SEQ ID NO: 914 - RNA, 25 nt, synthetic construct
  misc_feature 1..25: note = Description of Artificial Sequence: Synthetic oligonucleotide
  source 1..25: mol_type = other RNA
tatgtttaggggggaactgcatttt

SEQ ID NO: 915 - RNA, 25 nt, synthetic construct
  misc_feature 1..25: note = Description of Artificial Sequence: Synthetic oligonucleotide
  source 1..25: mol_type = other RNA
aaaaaacacttcattatgtttaggg

SEQ ID NO: 916 - RNA, 25 nt, synthetic construct
  misc_feature 1..25: note = Description of Artificial Sequence: Synthetic oligonucleotide
  source 1..25: mol_type = other RNA
taaaaaacacttcattatgtttagg

SEQ ID NO: 917 - RNA, 25 nt, synthetic construct
  misc_feature 1..25: note = Description of Artificial Sequence: Synthetic oligonucleotide
  source 1..25: mol_type = other RNA
ttaaaaaacacttcattatgtttag

SEQ ID NO: 918 - RNA, 25 nt, synthetic construct
  misc_feature 1..25: note = Description of Artificial Sequence: Synthetic oligonucleotide
  source 1..25: mol_type = other RNA
tttaaaaaacacttcattatgttta

SEQ ID NO: 919 - RNA, 25 nt, synthetic construct
  misc_feature 1..25: note = Description of Artificial Sequence: Synthetic oligonucleotide
  source 1..25: mol_type = other RNA
ttttaaaaaacacttcattatgttt

SEQ ID NO: 920 - RNA, 25 nt, synthetic construct
  misc_feature 1..25: note = Description of Artificial Sequence: Synthetic oligonucleotide
  source 1..25: mol_type = other RNA
tgattgctttcgcttctacagtgca

SEQ ID NO: 921 - RNA, 25 nt, synthetic construct
  misc_feature 1..25: note = Description of Artificial Sequence: Synthetic oligonucleotide
  source 1..25: mol_type = other RNA
gacgcaacattgcaagcgctgtgaa

SEQ ID NO: 922 - RNA, 25 nt, synthetic construct
  misc_feature 1..25: note = Description of Artificial Sequence: Synthetic oligonucleotide
  source 1..25: mol_type = other RNA
tacttgactattgagcttacttact

SEQ ID NO: 923 - RNA, 25 nt, synthetic construct
  misc_feature 1..25: note = Description of Artificial Sequence: Synthetic oligonucleotide
  source 1..25: mol_type = other RNA
aaaaaaattgaacacaatctcattg

SEQ ID NO: 924 - RNA, 25 nt, synthetic construct
  misc_feature 1..25: note = Description of Artificial Sequence: Synthetic oligonucleotide
  source 1..25: mol_type = other RNA
tcccagtttacaggtctatacttaa

SEQ ID NO: 925 - RNA, 25 nt, synthetic construct
  misc_feature 1..25: note = Description of Artificial Sequence: Synthetic oligonucleotide
  source 1..25: mol_type = other RNA
ttcccagtttacaggtctatactta

SEQ ID NO: 926 - RNA, 25 nt, synthetic construct
  misc_feature 1..25: note = Description of Artificial Sequence: Synthetic oligonucleotide
  source 1..25: mol_type = other RNA
gcactgtacaattttcccagtttac

SEQ ID NO: 927 - RNA, 25 nt, synthetic construct
  misc_feature 1..25: note = Description of Artificial Sequence: Synthetic oligonucleotide
  source 1..25: mol_type = other RNA
gagtataaaataaacctgctcagat

SEQ ID NO: 928 - RNA, 25 nt, synthetic construct
  misc_feature 1..25: note = Description of Artificial Sequence: Synthetic oligonucleotide
  source 1..25: mol_type = other RNA
atcttttctctaatcagagatacag

SEQ ID NO: 929 - RNA, 25 nt, synthetic construct
  misc_feature 1..25: note = Description of Artificial Sequence: Synthetic oligonucleotide
  source 1..25: mol_type = other RNA
aataaaagctagcatctgccccagt

SEQ ID NO: 930 - RNA, 25 nt, synthetic construct
  misc_feature 1..25: note = Description of Artificial Sequence: Synthetic oligonucleotide
  source 1..25: mol_type = other RNA
tgtgctatttgtgttaacatggaag

SEQ ID NO: 931 - RNA, 25 nt, synthetic construct
  misc_feature 1..25: note = Description of Artificial Sequence: Synthetic oligonucleotide
  source 1..25: mol_type = other RNA
acactgtgtgctatttgtgttaaca

SEQ ID NO: 932 - RNA, 25 nt, synthetic construct
  misc_feature 1..25: note = Description of Artificial Sequence: Synthetic oligonucleotide
  source 1..25: mol_type = other RNA
actatttgccatttaaaactagaac

SEQ ID NO: 933 - RNA, 25 nt, synthetic construct
  misc_feature 1..25: note = Description of Artificial Sequence: Synthetic oligonucleotide
  source 1..25: mol_type = other RNA
aataatatgatttattagcacaacg

SEQ ID NO: 934 - RNA, 25 nt, synthetic construct
  misc_feature 1..25: note = Description of Artificial Sequence: Synthetic oligonucleotide
  source 1..25: mol_type = other RNA
aggctgacaataaggtttgacagag

SEQ ID NO: 935 - RNA, 25 nt, synthetic construct
  misc_feature 1..25: note = Description of Artificial Sequence: Synthetic oligonucleotide
  source 1..25: mol_type = other RNA
gaggctgacaataaggtttgacaga

SEQ ID NO: 936 - RNA, 25 nt, synthetic construct
  misc_feature 1..25: note = Description of Artificial Sequence: Synthetic oligonucleotide
  source 1..25: mol_type = other RNA
agaggctgacaataaggtttgacag

SEQ ID NO: 937 - RNA, 25 nt, synthetic construct
  misc_feature 1..25: note = Description of Artificial Sequence: Synthetic oligonucleotide
  source 1..25: mol_type = other RNA
tattgaaaggaagaggctgacaata

SEQ ID NO: 938 - RNA, 25 nt, synthetic construct
  misc_feature 1..25: note = Description of Artificial Sequence: Synthetic oligonucleotide
  source 1..25: mol_type = other RNA
ccttgtataccatattgaaaggaag

SEQ ID NO: 939 - RNA, 25 nt, synthetic construct
  misc_feature 1..25: note = Description of Artificial Sequence: Synthetic oligonucleotide
  source 1..25: mol_type = other RNA
ttaagaccttgtataccatattgaa

SEQ ID NO: 940 - RNA, 25 nt, synthetic construct
  misc_feature 1..25: note = Description of Artificial Sequence: Synthetic oligonucleotide
  source 1..25: mol_type = other RNA
gatccagatctacttggttgtcaag

SEQ ID NO: 941 - RNA, 25 nt, synthetic construct
  misc_feature 1..25: note = Description of Artificial Sequence: Synthetic oligonucleotide
  source 1..25: mol_type = other RNA
caaaagaaatagatccagatctact

SEQ ID NO: 942 - RNA, 25 nt, synthetic construct
  misc_feature 1..25: note = Description of Artificial Sequence: Synthetic oligonucleotide
  source 1..25: mol_type = other RNA
tttaataatgtctttttaaaaatac

SEQ ID NO: 943 - RNA, 25 nt, synthetic construct
  misc_feature 1..25: note = Description of Artificial Sequence: Synthetic oligonucleotide
  source 1..25: mol_type = other RNA
tggaacgcaattaaatacactagta

SEQ ID NO: 944 - RNA, 25 nt, synthetic construct
  misc_feature 1..25: note = Description of Artificial Sequence: Synthetic oligonucleotide
  source 1..25: mol_type = other RNA
ttgaatgtgtaatgtgcaaaagccc

SEQ ID NO: 945 - RNA, 25 nt, synthetic construct
  misc_feature 1..25: note = Description of Artificial Sequence: Synthetic oligonucleotide
  source 1..25: mol_type = other RNA
ctcctggtgagagcttaaaagaaat

SEQ ID NO: 946 - RNA, 25 nt, synthetic construct
  misc_feature 1..25: note = Description of Artificial Sequence: Synthetic oligonucleotide
  source 1..25: mol_type = other RNA
gctcctggtgagagcttaaaagaaa

SEQ ID NO: 947 - RNA, 25 nt, synthetic construct
  misc_feature 1..25: note = Description of Artificial Sequence: Synthetic oligonucleotide
  source 1..25: mol_type = other RNA
accagtataaaagctactttgctcc

SEQ ID NO: 948 - RNA, 25 nt, synthetic construct
  misc_feature 1..25: note = Description of Artificial Sequence: Synthetic oligonucleotide
  source 1..25: mol_type = other RNA
ttctatattgtatttctcacaacaa

SEQ ID NO: 949 - RNA, 25 nt, synthetic construct
  misc_feature 1..25: note = Description of Artificial Sequence: Synthetic oligonucleotide
  source 1..25: mol_type = other RNA
agcattgggtgaggtaataaacctt

SEQ ID NO: 950 - RNA, 25 nt, synthetic construct
  misc_feature 1..25: note = Description of Artificial Sequence: Synthetic oligonucleotide
  source 1..25: mol_type = other RNA
ttgtagcttaattcagcattgggtg

SEQ ID NO: 951 - RNA, 25 nt, synthetic construct
  misc_feature 1..25: note = Description of Artificial Sequence: Synthetic oligonucleotide
  source 1..25: mol_type = other RNA
taaacttgtagcttaattcagcatt

SEQ ID NO: 952 - RNA, 25 nt, synthetic construct
  misc_feature 1..25: note = Description of Artificial Sequence: Synthetic oligonucleotide
  source 1..25: mol_type = other RNA
ataaacttgtagcttaattcagcat

SEQ ID NO: 953 - RNA, 25 nt, synthetic construct
  misc_feature 1..25: note = Description of Artificial Sequence: Synthetic oligonucleotide
  source 1..25: mol_type = other RNA
cttggatctattaaaaccacatcga

SEQ ID NO: 954 - RNA, 25 nt, synthetic construct
  misc_feature 1..25: note = Description of Artificial Sequence: Synthetic oligonucleotide
  source 1..25: mol_type = other RNA
atttggttttaaaatatgagtgcct

SEQ ID NO: 955 - RNA, 25 nt, synthetic construct
  misc_feature 1..25: note = Description of Artificial Sequence: Synthetic oligonucleotide
  source 1..25: mol_type = other RNA
aacagaacaagtttattctatcatt

SEQ ID NO: 956 - RNA, 25 nt, synthetic construct
  misc_feature 1..25: note = Description of Artificial Sequence: Synthetic oligonucleotide
  source 1..25: mol_type = other RNA
tgtatcaattggaaaggaagaaaaa

SEQ ID NO: 957 - RNA, 25 nt, synthetic construct
  misc_feature 1..25: note = Description of Artificial Sequence: Synthetic oligonucleotide
  source 1..25: mol_type = other RNA
aaagggttaaatgtatcaattggaa

SEQ ID NO: 958 - RNA, 25 nt, synthetic construct
  misc_feature 1..25: note = Description of Artificial Sequence: Synthetic oligonucleotide
  source 1..25: mol_type = other RNA
tctctaaagggttaaatgtatcaat

SEQ ID NO: 959 - RNA, 25 nt, synthetic construct
  misc_feature 1..25: note = Description of Artificial Sequence: Synthetic oligonucleotide
  source 1..25: mol_type = other RNA
tatgagctaaatgtctgtctctaaa

SEQ ID NO: 960 - RNA, 25 nt, synthetic construct
  misc_feature 1..25: note = Description of Artificial Sequence: Synthetic oligonucleotide
  source 1..25: mol_type = other RNA
ctatgagctaaatgtctgtctctaa

SEQ ID NO: 961 - RNA, 25 nt, synthetic construct
  misc_feature 1..25: note = Description of Artificial Sequence: Synthetic oligonucleotide
  source 1..25: mol_type = other RNA
taacgtgaggaggaaaaacagtctt

SEQ ID NO: 962 - RNA, 25 nt, synthetic construct
  misc_feature 1..25: note = Description of Artificial Sequence: Synthetic oligonucleotide
  source 1..25: mol_type = other RNA
tacagttttattttataacgtgagg

SEQ ID NO: 963 - RNA, 25 nt, synthetic construct
  misc_feature 1..25: note = Description of Artificial Sequence: Synthetic oligonucleotide
  source 1..25: mol_type = other RNA
atgtacagttttattttataacgtg

SEQ ID NO: 964 - RNA, 25 nt, synthetic construct
  misc_feature 1..25: note = Description of Artificial Sequence: Synthetic oligonucleotide
  source 1..25: mol_type = other RNA
cttagacagcatgtatggtatgtta

SEQ ID NO: 965 - RNA, 25 nt, synthetic construct
  misc_feature 1..25: note = Description of Artificial Sequence: Synthetic oligonucleotide
  source 1..25: mol_type = other RNA
tttttttaaacttagacagcatgta

SEQ ID NO: 966 - RNA, 25 nt, synthetic construct
  misc_feature 1..25: note = Description of Artificial Sequence: Synthetic oligonucleotide
  source 1..25: mol_type = other RNA
accgtttgaatgcatgatctgtatg

SEQ ID NO: 967 - RNA, 25 nt, synthetic construct
  misc_feature 1..25: note = Description of Artificial Sequence: Synthetic oligonucleotide
  source 1..25: mol_type = other RNA
caccgtttgaatgcatgatctgtat

SEQ ID NO: 968 - RNA, 25 nt, synthetic construct
  misc_feature 1..25: note = Description of Artificial Sequence: Synthetic oligonucleotide
  source 1..25: mol_type = other RNA
tcaccgtttgaatgcatgatctgta

SEQ ID NO: 969 - RNA, 25 nt, synthetic construct
  misc_feature 1..25: note = Description of Artificial Sequence: Synthetic oligonucleotide
  source 1..25: mol_type = other RNA
atcgccctccagccccactccctgt

SEQ ID NO: 970 - RNA, 25 nt, synthetic construct
  misc_feature 1..25: note = Description of Artificial Sequence: Synthetic oligonucleotide
  source 1..25: mol_type = other RNA
gaataatgatataaaaactgaatag

SEQ ID NO: 971 - RNA, 25 nt, synthetic construct
  misc_feature 1..25: note = Description of Artificial Sequence: Synthetic oligonucleotide
  source 1..25: mol_type = other RNA
taccctggagaaacacatgaaaaaa

SEQ ID NO: 972 - RNA, 25 nt, synthetic construct
  misc_feature 1..25: note = Description of Artificial Sequence: Synthetic oligonucleotide
  source 1..25: mol_type = other RNA
atgccttttagcgtgtacagtaccc

SEQ ID NO: 973 - RNA, 25 nt, synthetic construct
  misc_feature 1..25: note = Description of Artificial Sequence: Synthetic oligonucleotide
  source 1..25: mol_type = other RNA
atgaaaacgcatggccaggtgggga

SEQ ID NO: 974 - RNA, 25 nt, synthetic construct
  misc_feature 1..25: note = Description of Artificial Sequence: Synthetic oligonucleotide
  source 1..25: mol_type = other RNA
gcacatgaaaacgcatggccaggtg

SEQ ID NO: 975 - RNA, 25 nt, synthetic construct
  misc_feature 1..25: note = Description of Artificial Sequence: Synthetic oligonucleotide
  source 1..25: mol_type = other RNA
ggcacatgaaaacgcatggccaggt

SEQ ID NO: 976 - RNA, 25 nt, synthetic construct
  misc_feature 1..25: note = Description of Artificial Sequence: Synthetic oligonucleotide
  source 1..25: mol_type = other RNA
aggcacatgaaaacgcatggccagg

SEQ ID NO: 977 - RNA, 25 nt, synthetic construct
  misc_feature 1..25: note = Description of Artificial Sequence: Synthetic oligonucleotide
  source 1..25: mol_type = other RNA
accaggcacatgaaaacgcatggcc

SEQ ID NO: 978 - RNA, 25 nt, synthetic construct
  misc_feature 1..25: note = Description of Artificial Sequence: Synthetic oligonucleotide
  source 1..25: mol_type = other RNA
agctcaccaggcacatgaaaacgca

SEQ ID NO: 979 - RNA, 25 nt, synthetic construct
  misc_feature 1..25: note = Description of Artificial Sequence: Synthetic oligonucleotide
  source 1..25: mol_type = other RNA
ctgtgcccagagtagcaagctcacc

SEQ ID NO: 980 - RNA, 25 nt, synthetic construct
  misc_feature 1..25: note = Description of Artificial Sequence: Synthetic oligonucleotide
  source 1..25: mol_type = other RNA
ccacaggagaagccacacgggcgaa

SEQ ID NO: 981 - RNA, 25 nt, synthetic construct
  misc_feature 1..25: note = Description of Artificial Sequence: Synthetic oligonucleotide
  source 1..25: mol_type = other RNA
tcactgtccacaggagaagccacac

SEQ ID NO: 982 - RNA, 25 nt, synthetic construct
  misc_feature 1..25: note = Description of Artificial Sequence: Synthetic oligonucleotide
  source 1..25: mol_type = other RNA
ctcactgtccacaggagaagccaca

SEQ ID NO: 983 - RNA, 25 nt, synthetic construct
  misc_feature 1..25: note = Description of Artificial Sequence: Synthetic oligonucleotide
  source 1..25: mol_type = other RNA
gaactgtagcaatctcactgtccac

SEQ ID NO: 984 - RNA, 25 nt, synthetic construct
  misc_feature 1..25: note = Description of Artificial Sequence: Synthetic oligonucleotide
  source 1..25: mol_type = other RNA
acgcagcgacacttgtgagtactgt

SEQ ID NO: 985 - RNA, 25 nt, synthetic construct
  misc_feature 1..25: note = Description of Artificial Sequence: Synthetic oligonucleotide
  source 1..25: mol_type = other RNA
gacgcagcgacacttgtgagtactg

SEQ ID NO: 986 - RNA, 25 nt, synthetic construct
  misc_feature 1..25: note = Description of Artificial Sequence: Synthetic oligonucleotide
  source 1..25: mol_type = other RNA
gcccgggcaggcccagctcaaaaga

SEQ ID NO: 987 - RNA, 25 nt, synthetic construct
  misc_feature 1..25: note = Description of Artificial Sequence: Synthetic oligonucleotide
  source 1..25: mol_type = other RNA
ggcccgggcaggcccagctcaaaag

SEQ ID NO: 988 - RNA, 25 nt, synthetic construct
  misc_feature 1..25: note = Description of Artificial Sequence: Synthetic oligonucleotide
  source 1..25: mol_type = other RNA
ccatattagtggtccgggcccgggc

SEQ ID NO: 989 - RNA, 25 nt, synthetic construct
  misc_feature 1..25: note = Description of Artificial Sequence: Synthetic oligonucleotide
  source 1..25: mol_type = other RNA
cgccccatattagtggtccgggccc

SEQ ID NO: 990 - RNA, 25 nt, synthetic construct
  misc_feature 1..25: note = Description of Artificial Sequence: Synthetic oligonucleotide
  source 1..25: mol_type = other RNA
acgccccatattagtggtccgggcc

SEQ ID NO: 991 - RNA, 25 nt, synthetic construct
  misc_feature 1..25: note = Description of Artificial Sequence: Synthetic oligonucleotide
  source 1..25: mol_type = other RNA
ggagcacgccccatattagtggtcc

SEQ ID NO: 992 - RNA, 25 nt, synthetic construct
  misc_feature 1..25: note = Description of Artificial Sequence: Synthetic oligonucleotide
  source 1..25: mol_type = other RNA
gggagcacgccccatattagtggtc

SEQ ID NO: 993 - RNA, 25 nt, synthetic construct
  misc_feature 1..25: note = Description of Artificial Sequence: Synthetic oligonucleotide
  source 1..25: mol_type = other RNA
gtggagggagcacgccccatattag

SEQ ID NO: 994 - RNA, 25 nt, synthetic construct
  misc_feature 1..25: note = Description of Artificial Sequence: Synthetic oligonucleotide
  source 1..25: mol_type = other RNA
ggggcgcagcggcacgggaagtgga

SEQ ID NO: 995 - RNA, 25 nt, synthetic construct
  misc_feature 1..25: note = Description of Artificial Sequence: Synthetic oligonucleotide
  source 1..25: mol_type = other RNA
cggggcgcagcggcacgggaagtgg

SEQ ID NO: 996 - RNA, 25 nt, synthetic construct
  misc_feature 1..25: note = Description of Artificial Sequence: Synthetic oligonucleotide
  source 1..25: mol_type = other RNA
tctcggggcgcagcggcacgggaag

SEQ ID NO: 997 - RNA, 25 nt, synthetic construct
  misc_feature 1..25: note = Description of Artificial Sequence: Synthetic oligonucleotide
  source 1..25: mol_type = other RNA
gagggatctcggggcgcagcggcac

SEQ ID NO: 998 - RNA, 25 nt, synthetic construct
  misc_feature 1..25: note = Description of Artificial Sequence: Synthetic oligonucleotide
  source 1..25: mol_type = other RNA
ggagggatctcggggcgcagcggca

SEQ ID NO: 999 - RNA, 25 nt, synthetic construct
  misc_feature 1..25: note = Description of Artificial Sequence: Synthetic oligonucleotide
  source 1..25: mol_type = other RNA
tggacggagggatctcggggcgcag

SEQ ID NO: 1000 - RNA, 25 nt, synthetic construct
  misc_feature 1..25: note = Description of Artificial Sequence: Synthetic oligonucleotide
  source 1..25: mol_type = other RNA
cggggagctggacggagggatctcg

SEQ ID NO: 1001 - RNA, 25 nt, synthetic construct
  misc_feature 1..25: note = Description of Artificial Sequence: Synthetic oligonucleotide
  source 1..25: mol_type = other RNA
ccggggagctggacggagggatctc

SEQ ID NO: 1002 - RNA, 25 nt, synthetic construct
  misc_feature 1..25: note = Description of Artificial Sequence: Synthetic oligonucleotide
  source 1..25: mol_type = other RNA
cccggggagctggacggagggatct

SEQ ID NO: 1003 - RNA, 25 nt, synthetic construct
  misc_feature 1..25: note = Description of Artificial Sequence: Synthetic oligonucleotide
  source 1..25: mol_type = other RNA
cacaccgcccggggagctggacgga

SEQ ID NO: 1004 - RNA, 25 nt, synthetic construct
  misc_feature 1..25: note = Description of Artificial Sequence: Synthetic oligonucleotide
  source 1..25: mol_type = other RNA
ccacaccgcccggggagctggacgg

SEQ ID NO: 1005 - RNA, 25 nt, synthetic construct
  misc_feature 1..25: note = Description of Artificial Sequence: Synthetic oligonucleotide
  source 1..25: mol_type = other RNA
tctccacaccgcccggggagctgga

SEQ ID NO: 1006 - RNA, 25 nt, synthetic construct
  misc_feature 1..25: note = Description of Artificial Sequence: Synthetic oligonucleotide
  source 1..25: mol_type = other RNA
cgcttctccacaccgcccggggagc

SEQ ID NO: 1007 - RNA, 25 nt, synthetic construct
  misc_feature 1..25: note = Description of Artificial Sequence: Synthetic oligonucleotide
  source 1..25: mol_type = other RNA
agtttgcgcttctccacaccgcccg

SEQ ID NO: 1008 - RNA, 25 nt, synthetic construct
  misc_feature 1..25: note = Description of Artificial Sequence: Synthetic oligonucleotide
  source 1..25: mol_type = other RNA
gagtttgcgcttctccacaccgccc

SEQ ID NO: 1009 - RNA, 25 nt, synthetic construct
  misc_feature 1..25: note = Description of Artificial Sequence: Synthetic oligonucleotide
  source 1..25: mol_type = other RNA
ggagtttgcgcttctccacaccgcc

SEQ ID NO: 1010 - RNA, 25 nt, synthetic construct
  misc_feature 1..25: note = Description of Artificial Sequence: Synthetic oligonucleotide
  source 1..25: mol_type = other RNA
ctcgtcggagcactcctcggagaac

SEQ ID NO: 1011 - RNA, 25 nt, synthetic construct
  misc_feature 1..25: note = Description of Artificial Sequence: Synthetic oligonucleotide
  source 1..25: mol_type = other RNA
cctcgtcggagcactcctcggagaa

SEQ ID NO: 1012 - RNA, 25 nt, synthetic construct
  misc_feature 1..25: note = Description of Artificial Sequence: Synthetic oligonucleotide
  source 1..25: mol_type = other RNA
tttgcctcctcgtcggagcactcct

SEQ ID NO: 1013 - RNA, 25 nt, synthetic construct
  misc_feature 1..25: note = Description of Artificial Sequence: Synthetic oligonucleotide
  source 1..25: mol_type = other RNA
agacaatcgccttttgcctcctcgt

SEQ ID NO: 1014 - RNA, 25 nt, synthetic construct
  misc_feature 1..25: note = Description of Artificial Sequence: Synthetic oligonucleotide
  source 1..25: mol_type = other RNA
agctcaaagatcccttccttagctt

SEQ ID NO: 1015 - RNA, 25 nt, synthetic construct
  misc_feature 1..25: note = Description of Artificial Sequence: Synthetic oligonucleotide
  source 1..25: mol_type = other RNA
gtggctcgccggctacgcggcctcc

SEQ ID NO: 1016 - RNA, 25 nt, synthetic construct
  misc_feature 1..25: note = Description of Artificial Sequence: Synthetic oligonucleotide
  source 1..25: mol_type = other RNA
tactcgcagtggctcgccggctacg

SEQ ID NO: 1017 - RNA, 25 nt, synthetic construct
  misc_feature 1..25: note = Description of Artificial Sequence: Synthetic oligonucleotide
  source 1..25: mol_type = other RNA
agaacgtgtactcgcagtggctcgc

SEQ ID NO: 1018 - RNA, 25 nt, synthetic construct
  misc_feature 1..25: note = Description of Artificial Sequence: Synthetic oligonucleotide
  source 1..25: mol_type = other RNA
caacacggagaacgtgtactcgcag

SEQ ID NO: 1019 - RNA, 25 nt, synthetic construct
  misc_feature 1..25: note = Description of Artificial Sequence: Synthetic oligonucleotide
  source 1..25: mol_type = other RNA
ctgcccccggccgcgatgcccaaca

SEQ ID NO: 1020 - RNA, 25 nt, synthetic construct
  misc_feature 1..25: note = Description of Artificial Sequence: Synthetic oligonucleotide
  source 1..25: mol_type = other RNA
ctcgagaaggagttcgacctgcccc

SEQ ID NO: 1021 - RNA, 25 nt, synthetic construct
  misc_feature 1..25: note = Description of Artificial Sequence: Synthetic oligonucleotide
  source 1..25: mol_type = other RNA
ttctctaagcgcatcaagctcgaga

SEQ ID NO: 1022 - RNA, 25 nt, synthetic construct
  misc_feature 1..25: note = Description of Artificial Sequence: Synthetic oligonucleotide
  source 1..25: mol_type = other RNA
ggggcctgtccaaaaagctgctgct

SEQ ID NO: 1023 - RNA, 25 nt, synthetic construct
  misc_feature 1..25: note = Description of Artificial Sequence: Synthetic oligonucleotide
  source 1..25: mol_type = other RNA
gggggcctgtccaaaaagctgctgc

SEQ ID NO: 1024 - RNA, 25 nt, synthetic construct
  misc_feature 1..25: note = Description of Artificial Sequence: Synthetic oligonucleotide
  source 1..25: mol_type = other RNA
gctccccgggcgagtcggcctcggg

SEQ ID NO: 1025 - RNA, 25 nt, synthetic construct
  misc_feature 1..25: note = Description of Artificial Sequence: Synthetic oligonucleotide
  source 1..25: mol_type = other RNA
tgctccccgggcgagtcggcctcgg

SEQ ID NO: 1026 - RNA, 25 nt, synthetic construct
  misc_feature 1..25: note = Description of Artificial Sequence: Synthetic oligonucleotide
  source 1..25: mol_type = other RNA
ctgctccccgggcgagtcggcctcg

SEQ ID NO: 1027 - RNA, 25 nt, synthetic construct
  misc_feature 1..25: note = Description of Artificial Sequence: Synthetic oligonucleotide
  source 1..25: mol_type = other RNA
gctgctccccgggcgagtcggcctc

SEQ ID NO: 1028 - RNA, 25 nt, synthetic construct
  misc_feature 1..25: note = Description of Artificial Sequence: Synthetic oligonucleotide
  source 1..25: mol_type = other RNA
ggctgctccccgggcgagtcggcct

SEQ ID NO: 1029 - RNA, 25 nt, synthetic construct
  misc_feature 1..25: note = Description of Artificial Sequence: Synthetic oligonucleotide
  source 1..25: mol_type = other RNA
ggccgcggctgctccccgggcgagt

SEQ ID NO: 1030 - RNA, 25 nt, synthetic construct
  misc_feature 1..25: note = Description of Artificial Sequence: Synthetic oligonucleotide
  source 1..25: mol_type = other RNA
ctgttaatggccgcggctgctcccc

SEQ ID NO: 1031 - RNA, 25 nt, synthetic construct
  misc_feature 1..25: note = Description of Artificial Sequence: Synthetic oligonucleotide
  source 1..25: mol_type = other RNA
actgttaatggccgcggctgctccc

SEQ ID NO: 1032 - RNA, 25 nt, synthetic construct
  misc_feature 1..25: note = Description of Artificial Sequence: Synthetic oligonucleotide
  source 1..25: mol_type = other RNA
tagacgatggcactgttaatggccg

SEQ ID NO: 1033 - RNA, 25 nt, synthetic construct
  misc_feature 1..25: note = Description of Artificial Sequence: Synthetic oligonucleotide
  source 1..25: mol_type = other RNA
accgcatagacgatggcactgttaa

SEQ ID NO: 1034 - RNA, 25 nt, synthetic construct
  misc_feature 1..25: note = Description of Artificial Sequence: Synthetic oligonucleotide
  source 1..25: mol_type = other RNA
ccggcgagtcggaccgcatagacga

SEQ ID NO: 1035 - RNA, 25 nt, synthetic construct
  misc_feature 1..25: note = Description of Artificial Sequence: Synthetic oligonucleotide
  source 1..25: mol_type = other RNA
gacgaagactcggtggccggcgagt

SEQ ID NO: 1036 - RNA, 25 nt, synthetic construct
  misc_feature 1..25: note = Description of Artificial Sequence: Synthetic oligonucleotide
  source 1..25: mol_type = other RNA
acacttgcgacgaagactcggtggc

SEQ ID NO: 1037 - RNA, 25 nt, synthetic construct
  misc_feature 1..25: note = Description of Artificial Sequence: Synthetic oligonucleotide
  source 1..25: mol_type = other RNA
agggacacttgcgacgaagactcgg

SEQ ID NO: 1038 - RNA, 25 nt, synthetic construct
  misc_feature 1..25: note = Description of Artificial Sequence: Synthetic oligonucleotide
  source 1..25: mol_type = other RNA
cacagggacacttgcgacgaagact

SEQ ID NO: 1039 - RNA, 25 nt, synthetic construct
  misc_feature 1..25: note = Description of Artificial Sequence: Synthetic oligonucleotide
  source 1..25: mol_type = other RNA
cacctggccgaggccgagggccaca

SEQ ID NO: 1040 - RNA, 25 nt, synthetic construct
  misc_feature 1..25: note = Description of Artificial Sequence: Synthetic oligonucleotide
  source 1..25: mol_type = other RNA
ccacctggccgaggccgagggccac

SEQ ID NO: 1041 - RNA, 25 nt, synthetic construct
  misc_feature 1..25: note = Description of Artificial Sequence: Synthetic oligonucleotide
  source 1..25: mol_type = other RNA
agcgcggccacctggccgaggccga

SEQ ID NO: 1042 - RNA, 25 nt, synthetic construct
  misc_feature 1..25: note = Description of Artificial Sequence: Synthetic oligonucleotide
  source 1..25: mol_type = other RNA
aagcgcggccacctggccgaggccg

SEQ ID NO: 1043 - RNA, 25 nt, synthetic construct
  misc_feature 1..25: note = Description of Artificial Sequence: Synthetic oligonucleotide
  source 1..25: mol_type = other RNA
aagcataagcgcggccacctggccg

SEQ ID NO: 1044 - RNA, 25 nt, synthetic construct
  misc_feature 1..25: note = Description of Artificial Sequence: Synthetic oligonucleotide
  source 1..25: mol_type = other RNA
ggcgagaagcataagcgcggccacc

SEQ ID NO: 1045 - RNA, 25 nt, synthetic construct
  misc_feature 1..25: note = Description of Artificial Sequence: Synthetic oligonucleotide
  source 1..25: mol_type = other RNA
aggtcctgggcgagaagcataagcg

SEQ ID NO: 1046 - RNA, 25 nt, synthetic construct
  misc_feature 1..25: note = Description of Artificial Sequence: Synthetic oligonucleotide
  source 1..25: mol_type = other RNA
tcagcgaggccttccaccaggtcct

SEQ ID NO: 1047 - RNA, 25 nt, synthetic construct
  misc_feature 1..25: note = Description of Artificial Sequence: Synthetic oligonucleotide
  source 1..25: mol_type = other RNA
ttcagcgaggccttccaccaggtcc

SEQ ID NO: 1048 - RNA, 25 nt, synthetic construct
  misc_feature 1..25: note = Description of Artificial Sequence: Synthetic oligonucleotide
  source 1..25: mol_type = other RNA
cagcacttcagcgaggccttccacc

SEQ ID NO: 1049 - RNA, 25 nt, synthetic construct
  misc_feature 1..25: note = Description of Artificial Sequence: Synthetic oligonucleotide
  source 1..25: mol_type = other RNA
ctcagctccatgcagcacttcagcg

SEQ ID NO: 1050 - RNA, 25 nt, synthetic construct
  misc_feature 1..25: note = Description of Artificial Sequence: Synthetic oligonucleotide
  source 1..25: mol_type = other RNA
gccctgcccgacgtcatgcagggca

SEQ ID NO: 1051 - RNA, 25 nt, synthetic construct
  misc_feature 1..25: note = Description of Artificial Sequence: Synthetic oligonucleotide
  source 1..25: mol_type = other RNA
gccgcgccctgcccgacgtcatgca

SEQ ID NO: 1052 - RNA, 25 nt, synthetic construct
  misc_feature 1..25: note = Description of Artificial Sequence: Synthetic oligonucleotide
  source 1..25: mol_type = other RNA
agccgcgccctgcccgacgtcatgc

SEQ ID NO: 1053 - RNA, 25 nt, synthetic construct
  misc_feature 1..25: note = Description of Artificial Sequence: Synthetic oligonucleotide
  source 1..25: mol_type = other RNA
gctcgcggggcgcggtcgtgggcgt

SEQ ID NO: 1054 - RNA, 25 nt, synthetic construct
  misc_feature 1..25: note = Description of Artificial Sequence: Synthetic oligonucleotide
  source 1..25: mol_type = other RNA
agctcgcggggcgcggtcgtgggcg

SEQ ID NO: 1055 - RNA, 25 nt, synthetic construct
  misc_feature 1..25: note = Description of Artificial Sequence: Synthetic oligonucleotide
  source 1..25: mol_type = other RNA
agaacagctcgcggggcgcggtcgt

SEQ ID NO: 1056 - RNA, 25 nt, synthetic construct
  misc_feature 1..25: note = Description of Artificial Sequence: Synthetic oligonucleotide
  source 1..25: mol_type = other RNA
gagaacagctcgcggggcgcggtcg

SEQ ID NO: 1057 - RNA, 25 nt, synthetic construct
  misc_feature 1..25: note = Description of Artificial Sequence: Synthetic oligonucleotide
  source 1..25: mol_type = other RNA
caccacgagaacagctcgcggggcg

SEQ ID NO: 1058 - RNA, 25 nt, synthetic construct
  misc_feature 1..25: note = Description of Artificial Sequence: Synthetic oligonucleotide
  source 1..25: mol_type = other RNA
cgcgccaccacgagaacagctcgcg

SEQ ID NO: 1059 - RNA, 25 nt, synthetic construct
  misc_feature 1..25: note = Description of Artificial Sequence: Synthetic oligonucleotide
  source 1..25: mol_type = other RNA
gcgcgccaccacgagaacagctcgc

SEQ ID NO: 1060 - RNA, 25 nt, synthetic construct
  misc_feature 1..25: note = Description of Artificial Sequence: Synthetic oligonucleotide
  source 1..25: mol_type = other RNA
ggcgcgccaccacgagaacagctcg

SEQ ID NO: 1061 - RNA, 25 nt, synthetic construct
  misc_feature 1..25: note = Description of Artificial Sequence: Synthetic oligonucleotide
  source 1..25: mol_type = other RNA
tacggcttcgggctgagcctggagg

SEQ ID NO: 1062 - RNA, 25 nt, synthetic construct
  misc_feature 1..25: note = Description of Artificial Sequence: Synthetic oligonucleotide
  source 1..25: mol_type = other RNA
gactacggcttcgggctgagcctgg

SEQ ID NO: 1063 - RNA, 25 nt, synthetic construct
  misc_feature 1..25: note = Description of Artificial Sequence: Synthetic oligonucleotide
  source 1..25: mol_type = other RNA
ctggactacggcttcgggctgagcc

SEQ ID NO: 1064 - RNA, 25 nt, synthetic construct
  misc_feature 1..25: note = Description of Artificial Sequence: Synthetic oligonucleotide
  source 1..25: mol_type = other RNA
ctcgctctccctggactacggcttc

SEQ ID NO: 1065 - RNA, 25 nt, synthetic construct
  misc_feature 1..25: note = Description of Artificial Sequence: Synthetic oligonucleotide
  source 1..25: mol_type = other RNA
tctcgctctccctggactacggctt

SEQ ID NO: 1066 - RNA, 25 nt, synthetic construct
  misc_feature 1..25: note = Description of Artificial Sequence: Synthetic oligonucleotide
  source 1..25: mol_type = other RNA
actgcctctcgctctccctggacta

SEQ ID NO: 1067 - RNA, 25 nt, synthetic construct
  misc_feature 1..25: note = Description of Artificial Sequence: Synthetic oligonucleotide
  source 1..25: mol_type = other RNA
ctcctcgactgcctctcgctctccc

SEQ ID NO: 1068 - RNA, 25 nt, synthetic construct
  misc_feature 1..25: note = Description of Artificial Sequence: Synthetic oligonucleotide
  source 1..25: mol_type = other RNA
gccagcagcgcgctcaagtccgtgg

SEQ ID NO: 1069 - RNA, 25 nt, synthetic construct
  misc_feature 1..25: note = Description of Artificial Sequence: Synthetic oligonucleotide
  source 1..25: mol_type = other RNA
agcgccagcagcgcgctcaagtccg

SEQ ID NO: 1070 - RNA, 25 nt, synthetic construct
  misc_feature 1..25: note = Description of Artificial Sequence: Synthetic oligonucleotide
  source 1..25: mol_type = other RNA
cggaacccggcaccagcgacttggt

SEQ ID NO: 1071 - RNA, 25 nt, synthetic construct
  misc_feature 1..25: note = Description of Artificial Sequence: Synthetic oligonucleotide
  source 1..25: mol_type = other RNA
ccggaacccggcaccagcgacttgg

SEQ ID NO: 1072 - RNA, 25 nt, synthetic construct
  misc_feature 1..25: note = Description of Artificial Sequence: Synthetic oligonucleotide
  source 1..25: mol_type = other RNA
tccccggaacccggcaccagcgact

SEQ ID NO: 1073 - RNA, 25 nt, synthetic construct
  misc_feature 1..25: note = Description of Artificial Sequence: Synthetic oligonucleotide
  source 1..25: mol_type = other RNA
tctccaccgccagctccccggaacc

SEQ ID NO: 1074 - RNA, 25 nt, synthetic construct
  misc_feature 1..25: note = Description of Artificial Sequence: Synthetic oligonucleotide
  source 1..25: mol_type = other RNA
gacggtctctccaccgccagctccc

SEQ ID NO: 1075 - RNA, 25 nt, synthetic construct
  misc_feature 1..25: note = Description of Artificial Sequence: Synthetic oligonucleotide
  source 1..25: mol_type = other RNA
cccccatgacggtcaagtccgacga

SEQ ID NO: 1076 - RNA, 25 nt, synthetic construct
  misc_feature 1..25: note = Description of Artificial Sequence: Synthetic oligonucleotide
  source 1..25: mol_type = other RNA
cacatgcacaaatcgtcccccatga

SEQ ID NO: 1077 - RNA, 25 nt, synthetic construct
  misc_feature 1..25: note = Description of Artificial Sequence: Synthetic oligonucleotide
  source 1..25: mol_type = other RNA
aacctgtgcgaccacgcgtgcaccc

SEQ ID NO: 1078 - RNA, 25 nt, synthetic construct
  misc_feature 1..25: note = Description of Artificial Sequence: Synthetic oligonucleotide
  source 1..25: mol_type = other RNA
tggtggtgcaccggcgcagccacac

SEQ ID NO: 1079 - RNA, 25 nt, synthetic construct
  misc_feature 1..25: note = Description of Artificial Sequence: Synthetic oligonucleotide
  source 1..25: mol_type = other RNA
ctggtggtgcaccggcgcagccaca

SEQ ID NO: 1080 - RNA, 25 nt, synthetic construct
  misc_feature 1..25: note = Description of Artificial Sequence: Synthetic oligonucleotide
  source 1..25: mol_type = other RNA
atttcagagcaacctggtggtgcac

SEQ ID NO: 1081 - RNA, 25 nt, synthetic construct
  misc_feature 1..25: note = Description of Artificial Sequence: Synthetic oligonucleotide
  source 1..25: mol_type = other RNA
acgttcaaatttcagagcaacctgg

SEQ ID NO: 1082 - RNA, 25 nt, synthetic construct
  misc_feature 1..25: note = Description of Artificial Sequence: Synthetic oligonucleotide
  source 1..25: mol_type = other RNA
aagacgttcaaatttcagagcaacc

SEQ ID NO: 1083 - RNA, 25 nt, synthetic construct
  misc_feature 1..25: note = Description of Artificial Sequence: Synthetic oligonucleotide
  source 1..25: mol_type = other RNA
tcaagtccaagtcatgcgagttctg

SEQ ID NO: 1084 - RNA, 25 nt, synthetic construct
  misc_feature 1..25: note = Description of Artificial Sequence: Synthetic oligonucleotide
  source 1..25: mol_type = other RNA
tccgcccctcctccctcccagcccc

SEQ ID NO: 1085 - RNA, 25 nt, synthetic construct
  misc_feature 1..25: note = Description of Artificial Sequence: Synthetic oligonucleotide
  source 1..25: mol_type = other RNA
cagccaggtagcaagccgcccttcc

SEQ ID NO: 1086 - RNA, 25 nt, synthetic construct
  misc_feature 1..25: note = Description of Artificial Sequence: Synthetic oligonucleotide
  source 1..25: mol_type = other RNA
aaaggttactgcaaccattccagcc

SEQ ID NO: 1087 - RNA, 25 nt, synthetic construct
  misc_feature 1..25: note = Description of Artificial Sequence: Synthetic oligonucleotide
  source 1..25: mol_type = other RNA
cccaggccggcccagccctatgcaa

SEQ ID NO: 1088 - RNA, 25 nt, synthetic construct
  misc_feature 1..25: note = Description of Artificial Sequence: Synthetic oligonucleotide
  source 1..25: mol_type = other RNA
gtctagcccaccgctgtccccaggc

SEQ ID NO: 1089 - RNA, 25 nt, synthetic construct
  misc_feature 1..25: note = Description of Artificial Sequence: Synthetic oligonucleotide
  source 1..25: mol_type = other RNA
acacgtctagcccaccgctgtcccc

SEQ ID NO: 1090 - RNA, 25 nt, synthetic construct
  misc_feature 1..25: note = Description of Artificial Sequence: Synthetic oligonucleotide
  source 1..25: mol_type = other RNA
ctctaggagacttagagagctggca

SEQ ID NO: 1091 - RNA, 25 nt, synthetic construct
  misc_feature 1..25: note = Description of Artificial Sequence: Synthetic oligonucleotide
  source 1..25: mol_type = other RNA
tctctaggagacttagagagctggc

SEQ ID NO: 1092 - RNA, 25 nt, synthetic construct
  misc_feature 1..25: note = Description of Artificial Sequence: Synthetic oligonucleotide
  source 1..25: mol_type = other RNA
gatttctctaggagacttagagagc

SEQ ID NO: 1093 - RNA, 25 nt, synthetic construct
  misc_feature 1..25: note = Description of Artificial Sequence: Synthetic oligonucleotide
  source 1..25: mol_type = other RNA
ggagcctcccgccatggatttctct

SEQ ID NO: 1094 - RNA, 25 nt, synthetic construct
  misc_feature 1..25: note = Description of Artificial Sequence: Synthetic oligonucleotide
  source 1..25: mol_type = other RNA
ccaatggctatggagcctcccgcca

SEQ ID NO: 1095 - RNA, 25 nt, synthetic construct
  misc_feature 1..25: note = Description of Artificial Sequence: Synthetic oligonucleotide
  source 1..25: mol_type = other RNA
gtgctgcggttgaatccaatggcta

SEQ ID NO: 1096 - RNA, 25 nt, synthetic construct
  misc_feature 1..25: note = Description of Artificial Sequence: Synthetic oligonucleotide
  source 1..25: mol_type = other RNA
gacagggtgctgcggttgaatccaa

SEQ ID NO: 1097 - RNA, 25 nt, synthetic construct
  misc_feature 1..25: note = Description of Artificial Sequence: Synthetic oligonucleotide
  source 1..25: mol_type = other RNA
cccgagtgcctttgacagggtgctg

SEQ ID NO: 1098 - RNA, 25 nt, synthetic construct
  misc_feature 1..25: note = Description of Artificial Sequence: Synthetic oligonucleotide
  source 1..25: mol_type = other RNA
acccatcacccgagtgcctttgaca

SEQ ID NO: 1099 - RNA, 25 nt, synthetic construct
  misc_feature 1..25: note = Description of Artificial Sequence: Synthetic oligonucleotide
  source 1..25: mol_type = other RNA
cacccatcacccgagtgcctttgac

SEQ ID NO: 1100 - RNA, 25 nt, synthetic construct
  misc_feature 1..25: note = Description of Artificial Sequence: Synthetic oligonucleotide
  source 1..25: mol_type = other RNA
cgcctgggggcggaagagatggccc

SEQ ID NO: 1101 - RNA, 25 nt, synthetic construct
  misc_feature 1..25: note = Description of Artificial Sequence: Synthetic oligonucleotide
  source 1..25: mol_type = other RNA
atagagcgcctgggggcggaagaga

SEQ ID NO: 1102 - RNA, 25 nt, synthetic construct
  misc_feature 1..25: note = Description of Artificial Sequence: Synthetic oligonucleotide
  source 1..25: mol_type = other RNA
ccccaccgcatagagcgcctggggg

SEQ ID NO: 1103 - RNA, 25 nt, synthetic construct
  misc_feature 1..25: note = Description of Artificial Sequence: Synthetic oligonucleotide
  source 1..25: mol_type = other RNA
gacccccaccgcatagagcgcctgg

SEQ ID NO: 1104 - RNA, 25 nt, synthetic construct
  misc_feature 1..25: note = Description of Artificial Sequence: Synthetic oligonucleotide
  source 1..25: mol_type = other RNA
ggacccccaccgcatagagcgcctg

SEQ ID NO: 1105 - RNA, 25 nt, synthetic construct
  misc_feature 1..25: note = Description of Artificial Sequence: Synthetic oligonucleotide
  source 1..25: mol_type = other RNA
tggacccccaccgcatagagcgcct

SEQ ID NO: 1106 - RNA, 25 nt, synthetic construct
  misc_feature 1..25: note = Description of Artificial Sequence: Synthetic oligonucleotide
  source 1..25: mol_type = other RNA
ttggacccccaccgcatagagcgcc

SEQ ID NO: 1107 - RNA, 25 nt, synthetic construct
  misc_feature 1..25: note = Description of Artificial Sequence: Synthetic oligonucleotide
  source 1..25: mol_type = other RNA
tttagtccaccaccgagacatcact

SEQ ID NO: 1108 - RNA, 25 nt, synthetic construct
  misc_feature 1..25: note = Description of Artificial Sequence: Synthetic oligonucleotide
  source 1..25: mol_type = other RNA
gagagaggcttccggcctggcagaa

SEQ ID NO: 1109 - RNA, 25 nt, synthetic construct
  misc_feature 1..25: note = Description of Artificial Sequence: Synthetic oligonucleotide
  source 1..25: mol_type = other RNA
cgagagaggcttccggcctggcaga

SEQ ID NO: 1110 - RNA, 25 nt, synthetic construct
  misc_feature 1..25: note = Description of Artificial Sequence: Synthetic oligonucleotide
  source 1..25: mol_type = other RNA
tcagtatcgagagaggcttccggcc

SEQ ID NO: 1111 - RNA, 25 nt, synthetic construct
  misc_feature 1..25: note = Description of Artificial Sequence: Synthetic oligonucleotide
  source 1..25: mol_type = other RNA
caggatcagtatcgagagaggcttc

SEQ ID NO: 1112 - RNA, 25 nt, synthetic construct
  misc_feature 1..25: note = Description of Artificial Sequence: Synthetic oligonucleotide
  source 1..25: mol_type = other RNA
agaataccaggatcagtatcgagag

SEQ ID NO: 1113 - RNA, 25 nt, synthetic construct
  misc_feature 1..25: note = Description of Artificial Sequence: Synthetic oligonucleotide
  source 1..25: mol_type = other RNA
acccctttaacctgctaagaatacc

SEQ ID NO: 1114 - RNA, 25 nt, synthetic construct
  misc_feature 1..25: note = Description of Artificial Sequence: Synthetic oligonucleotide
  source 1..25: mol_type = other RNA
atgtccttcccagccacctctccat

SEQ ID NO: 1115 - RNA, 25 nt, synthetic construct
  misc_feature 1..25: note = Description of Artificial Sequence: Synthetic oligonucleotide
  source 1..25: mol_type = other RNA
aatgtccttcccagccacctctcca

SEQ ID NO: 1116 - RNA, 25 nt, synthetic construct
  misc_feature 1..25: note = Description of Artificial Sequence: Synthetic oligonucleotide
  source 1..25: mol_type = other RNA
cgcgggttggtatcccttcaggact

SEQ ID NO: 1117 - RNA, 25 nt, synthetic construct
  misc_feature 1..25: note = Description of Artificial Sequence: Synthetic oligonucleotide
  source 1..25: mol_type = other RNA
tgaccccgcgggttggtatcccttc

SEQ ID NO: 1118 - RNA, 25 nt, synthetic construct
  misc_feature 1..25: note = Description of Artificial Sequence: Synthetic oligonucleotide
  source 1..25: mol_type = other RNA
acggaagtcccctgaccccgcgggt

SEQ ID NO: 1119 - RNA, 25 nt, synthetic construct
  misc_feature 1..25: note = Description of Artificial Sequence: Synthetic oligonucleotide
  source 1..25: mol_type = other RNA
gaacacggaagtcccctgaccccgc

SEQ ID NO: 1120 - RNA, 25 nt, synthetic construct
  misc_feature 1..25: note = Description of Artificial Sequence: Synthetic oligonucleotide
  source 1..25: mol_type = other RNA
cgaacacggaagtcccctgaccccg

SEQ ID NO: 1121 - RNA, 25 nt, synthetic construct
  misc_feature 1..25: note = Description of Artificial Sequence: Synthetic oligonucleotide
  source 1..25: mol_type = other RNA
taagaatctacttagaaagcgaaca

SEQ ID NO: 1122 - RNA, 25 nt, synthetic construct
  misc_feature 1..25: note = Description of Artificial Sequence: Synthetic oligonucleotide
  source 1..25: mol_type = other RNA
tcttgcaacacgcacagaacactca

SEQ ID NO: 1123 - RNA, 25 nt, synthetic construct
  misc_feature 1..25: note = Description of Artificial Sequence: Synthetic oligonucleotide
  source 1..25: mol_type = other RNA
ttgcaaacagccattcaccagtgca

SEQ ID NO: 1124 - RNA, 25 nt, synthetic construct
  misc_feature 1..25: note = Description of Artificial Sequence: Synthetic oligonucleotide
  source 1..25: mol_type = other RNA
taaggctcaacttacaaataccctg

SEQ ID NO: 1125 - RNA, 25 nt, synthetic construct
  misc_feature 1..25: note = Description of Artificial Sequence: Synthetic oligonucleotide
  source 1..25: mol_type = other RNA
aaggctcaacttacaaataccctgc

SEQ ID NO: 1126 - RNA, 25 nt, synthetic construct
  misc_feature 1..25: note = Description of Artificial Sequence: Synthetic oligonucleotide
  source 1..25: mol_type = other RNA
aggctcaacttacaaataccctgcg

SEQ ID NO: 1127 - RNA, 25 nt, synthetic construct
  misc_feature 1..25: note = Description of Artificial Sequence: Synthetic oligonucleotide
  source 1..25: mol_type = other RNA
gcggggcatattctgcactcatccc

SEQ ID NO: 1128 - RNA, 25 nt, synthetic construct
  misc_feature 1..25: note = Description of Artificial Sequence: Synthetic oligonucleotide
  source 1..25: mol_type = other RNA
gcatattctgcactcatcccaggcg

SEQ ID NO: 1129 - RNA, 25 nt, synthetic construct
  misc_feature 1..25: note = Description of Artificial Sequence: Synthetic oligonucleotide
  source 1..25: mol_type = other RNA
catattctgcactcatcccaggcgt

SEQ ID NO: 1130 - RNA, 25 nt, synthetic construct
  misc_feature 1..25: note = Description of Artificial Sequence: Synthetic oligonucleotide
  source 1..25: mol_type = other RNA
atattctgcactcatcccaggcgtg

SEQ ID NO: 1131 - RNA, 25 nt, synthetic construct
  misc_feature 1..25: note = Description of Artificial Sequence: Synthetic oligonucleotide
  source 1..25: mol_type = other RNA
ggattagagctccatgtgcagaacg

SEQ ID NO: 1132 - RNA, 25 nt, synthetic construct
  misc_feature 1..25: note = Description of Artificial Sequence: Synthetic oligonucleotide
  source 1..25: mol_type = other RNA
gattagagctccatgtgcagaacga

SEQ ID NO: 1133 - RNA, 25 nt, synthetic construct
  misc_feature 1..25: note = Description of Artificial Sequence: Synthetic oligonucleotide
  source 1..25: mol_type = other RNA
attagagctccatgtgcagaacgag

SEQ ID NO: 1134 - RNA, 25 nt, synthetic construct
  misc_feature 1..25: note = Description of Artificial Sequence: Synthetic oligonucleotide
  source 1..25: mol_type = other RNA
agagctccatgtgcagaacgagggg

SEQ ID NO: 1135 - RNA, 25 nt, synthetic construct
  misc_feature 1..25: note = Description of Artificial Sequence: Synthetic oligonucleotide
  source 1..25: mol_type = other RNA
tccatgtgcagaacgaggggaggag

SEQ ID NO: 1136 - RNA, 25 nt, synthetic construct
  misc_feature 1..25: note = Description of Artificial Sequence: Synthetic oligonucleotide
  source 1..25: mol_type = other RNA
ggatgagtgcagaatatgccccgca

SEQ ID NO: 1137 - RNA, 25 nt, synthetic construct
  misc_feature 1..25: note = Description of Artificial Sequence: Synthetic oligonucleotide
  source 1..25: mol_type = other RNA
gggatgagtgcagaatatgccccgc

SEQ ID NO: 1138 - RNA, 25 nt, synthetic construct
  misc_feature 1..25: note = Description of Artificial Sequence: Synthetic oligonucleotide
  source 1..25: mol_type = other RNA
acatggagctctaatccccacgcct

SEQ ID NO: 1139 - RNA, 25 nt, synthetic construct
  misc_feature 1..25: note = Description of Artificial Sequence: Synthetic oligonucleotide
  source 1..25: mol_type = other RNA
cacatggagctctaatccccacgcc

SEQ ID NO: 1140 - RNA, 25 nt, synthetic construct
  misc_feature 1..25: note = Description of Artificial Sequence: Synthetic oligonucleotide
  source 1..25: mol_type = other RNA
gcctctcctcccctcgttctgcaca

SEQ ID NO: 1141 - RNA, 25 nt, synthetic construct
  misc_feature 1..25: note = Description of Artificial Sequence: Synthetic oligonucleotide
  source 1..25: mol_type = other RNA
tcacagataaacttctgcactggag

SEQ ID NO: 1142 - RNA, 25 nt, synthetic construct
  misc_feature 1..25: note = Description of Artificial Sequence: Synthetic oligonucleotide
  source 1..25: mol_type = other RNA
ttcacagataaacttctgcactgga

SEQ ID NO: 1143 - RNA, 25 nt, synthetic construct
  misc_feature 1..25: note = Description of Artificial Sequence: Synthetic oligonucleotide
  source 1..25: mol_type = other RNA
tttcacagataaacttctgcactgg

SEQ ID NO: 1144 - RNA, 25 nt, synthetic construct
  misc_feature 1..25: note = Description of Artificial Sequence: Synthetic oligonucleotide
  source 1..25: mol_type = other RNA
ttctttcacagataaacttctgcac

SEQ ID NO: 1145 - RNA, 25 nt, synthetic construct
  misc_feature 1..25: note = Description of Artificial Sequence: Synthetic oligonucleotide
  source 1..25: mol_type = other RNA
catttacctgctatgtgttcctgtt

SEQ ID NO: 1146 - RNA, 25 nt, synthetic construct
  misc_feature 1..25: note = Description of Artificial Sequence: Synthetic oligonucleotide
  source 1..25: mol_type = other RNA
atttacctgctatgtgttcctgttt

SEQ ID NO: 1147 - RNA, 25 nt, synthetic construct
  misc_feature 1..25: note = Description of Artificial Sequence: Synthetic oligonucleotide
  source 1..25: mol_type = other RNA
tttacctgctatgtgttcctgtttg

SEQ ID NO: 1148 - RNA, 25 nt, synthetic construct
  misc_feature 1..25: note = Description of Artificial Sequence: Synthetic oligonucleotide
  source 1..25: mol_type = other RNA
acgttgataaacaatcgtcatcctc

SEQ ID NO: 1149 - RNA, 25 nt, synthetic construct
  misc_feature 1..25: note = Description of Artificial Sequence: Synthetic oligonucleotide
  source 1..25: mol_type = other RNA
acaatcgtcatcctctggcgtgacc

SEQ ID NO: 1150 - RNA, 25 nt, synthetic construct
  misc_feature 1..25: note = Description of Artificial Sequence: Synthetic oligonucleotide
  source 1..25: mol_type = other RNA
ggcgtgacctggatgccaacctcca

SEQ ID NO: 1151 - RNA, 25 nt, synthetic construct
  misc_feature 1..25: note = Description of Artificial Sequence: Synthetic oligonucleotide
  source 1..25: mol_type = other RNA
gcgtgacctggatgccaacctccac

SEQ ID NO: 1152 - RNA, 25 nt, synthetic construct
  misc_feature 1..25: note = Description of Artificial Sequence: Synthetic oligonucleotide
  source 1..25: mol_type = other RNA
acctggatgccaacctccacgggat

SEQ ID NO: 1153 - RNA, 25 nt, synthetic construct
  misc_feature 1..25: note = Description of Artificial Sequence: Synthetic oligonucleotide
  source 1..25: mol_type = other RNA
gattggatgcttttttcatctcgat

SEQ ID NO: 1154 - RNA, 25 nt, synthetic construct
  misc_feature 1..25: note = Description of Artificial Sequence: Synthetic oligonucleotide
  source 1..25: mol_type = other RNA
atgcttttttcatctcgattggtga

SEQ ID NO: 1155 - RNA, 25 nt, synthetic construct
  misc_feature 1..25: note = Description of Artificial Sequence: Synthetic oligonucleotide
  source 1..25: mol_type = other RNA
tgcttttttcatctcgattggtgaa

SEQ ID NO: 1156 - RNA, 25 nt, synthetic construct
  misc_feature 1..25: note = Description of Artificial Sequence: Synthetic oligonucleotide
  source 1..25: mol_type = other RNA
gcttttttcatctcgattggtgaag

SEQ ID NO: 1157 - RNA, 25 nt, synthetic construct
  misc_feature 1..25: note = Description of Artificial Sequence: Synthetic oligonucleotide
  source 1..25: mol_type = other RNA
ttttcatctcgattggtgaagggga

SEQ ID NO: 1158 - RNA, 25 nt, synthetic construct
  misc_feature 1..25: note = Description of Artificial Sequence: Synthetic oligonucleotide
  source 1..25: mol_type = other RNA
tcatctcgattggtgaaggggaagg

SEQ ID NO: 1159 - RNA, 25 nt, synthetic construct
  misc_feature 1..25: note = Description of Artificial Sequence: Synthetic oligonucleotide
  source 1..25: mol_type = other RNA
cttatccacagctttttctaagcag

SEQ ID NO: 1160 - RNA, 25 nt, synthetic construct
  misc_feature 1..25: note = Description of Artificial Sequence: Synthetic oligonucleotide
  source 1..25: mol_type = other RNA
cgataaaaataagaatgtcccccaa

SEQ ID NO: 1161 - RNA, 25 nt, synthetic construct
  misc_feature 1..25: note = Description of Artificial Sequence: Synthetic oligonucleotide
  source 1..25: mol_type = other RNA
gataaaaataagaatgtcccccaat

SEQ ID NO: 1162 - RNA, 25 nt, synthetic construct
  misc_feature 1..25: note = Description of Artificial Sequence: Synthetic oligonucleotide
  source 1..25: mol_type = other RNA
aatgtcccccaatgggaagttcatc

SEQ ID NO: 1163 - RNA, 25 nt, synthetic construct
  misc_feature 1..25: note = Description of Artificial Sequence: Synthetic oligonucleotide
  source 1..25: mol_type = other RNA
gggaagttcatctggcactgcccac

SEQ ID NO: 1164 - RNA, 25 nt, synthetic construct
  misc_feature 1..25: note = Description of Artificial Sequence: Synthetic oligonucleotide
  source 1..25: mol_type = other RNA
gttcatctggcactgcccacaggtg

SEQ ID NO: 1165 - RNA, 25 nt, synthetic construct
  misc_feature 1..25: note = Description of Artificial Sequence: Synthetic oligonucleotide
  source 1..25: mol_type = other RNA
catctggcactgcccacaggtgagg

SEQ ID NO: 1166 - RNA, 25 nt, synthetic construct
  misc_feature 1..25: note = Description of Artificial Sequence: Synthetic oligonucleotide
  source 1..25: mol_type = other RNA
aggtgaggaggtcatgatccccttc

SEQ ID NO: 1167 - RNA, 25 nt, synthetic construct
  misc_feature 1..25: note = Description of Artificial Sequence: Synthetic oligonucleotide
  source 1..25: mol_type = other RNA
catgatccccttctggagctcccaa

SEQ ID NO: 1168 - RNA, 25 nt, synthetic construct
  misc_feature 1..25: note = Description of Artificial Sequence: Synthetic oligonucleotide
  source 1..25: mol_type = other RNA
atgatccccttctggagctcccaac

SEQ ID NO: 1169 - RNA, 25 nt, synthetic construct
  misc_feature 1..25: note = Description of Artificial Sequence: Synthetic oligonucleotide
  source 1..25: mol_type = other RNA
cccttctggagctcccaacgggccg

SEQ ID NO: 1170 - RNA, 25 nt, synthetic construct
  misc_feature 1..25: note = Description of Artificial Sequence: Synthetic oligonucleotide
  source 1..25: mol_type = other RNA
ctggagctcccaacgggccgtggtc

SEQ ID NO: 1171 - RNA, 25 nt, synthetic construct
  misc_feature 1..25: note = Description of Artificial Sequence: Synthetic oligonucleotide
  source 1..25: mol_type = other RNA
tggtctggttcatcatctgtaagaa

SEQ ID NO: 1172 - RNA, 25 nt, synthetic construct
  misc_feature 1..25: note = Description of Artificial Sequence: Synthetic oligonucleotide
  source 1..25: mol_type = other RNA
catcatctgtaagaatggcttcaag

SEQ ID NO: 1173 - RNA, 25 nt, synthetic construct
  misc_feature 1..25: note = Description of Artificial Sequence: Synthetic oligonucleotide
  source 1..25: mol_type = other RNA
tctgtaagaatggcttcaagaggct

SEQ ID NO: 1174 - RNA, 25 nt, synthetic construct
  misc_feature 1..25: note = Description of Artificial Sequence: Synthetic oligonucleotide
  source 1..25: mol_type = other RNA
agaatggcttcaagaggctcggctg

SEQ ID NO: 1175 - RNA, 25 nt, synthetic construct
  misc_feature 1..25: note = Description of Artificial Sequence: Synthetic oligonucleotide
  source 1..25: mol_type = other RNA
tggcttcaagaggctcggctgtggt

SEQ ID NO: 1176 - RNA, 25 nt, synthetic construct
  misc_feature 1..25: note = Description of Artificial Sequence: Synthetic oligonucleotide
  source 1..25: mol_type = other RNA
acacatagcaggtaaatgagaagca

SEQ ID NO: 1177 - RNA, 25 nt, synthetic construct
  misc_feature 1..25: note = Description of Artificial Sequence: Synthetic oligonucleotide
  source 1..25: mol_type = other RNA
tttgccccaaacaggaacacatagc

SEQ ID NO: 1178 - RNA, 25 nt, synthetic construct
  misc_feature 1..25: note = Description of Artificial Sequence: Synthetic oligonucleotide
  source 1..25: mol_type = other RNA
tcatctagaggaatttgccccaaac

SEQ ID NO: 1179 - RNA, 25 nt, synthetic construct
  misc_feature 1..25: note = Description of Artificial Sequence: Synthetic oligonucleotide
  source 1..25: mol_type = other RNA
acgattgtttatcaacgtcatctag

SEQ ID NO: 1180 - RNA, 25 nt, synthetic construct
  misc_feature 1..25: note = Description of Artificial Sequence: Synthetic oligonucleotide
  source 1..25: mol_type = other RNA
gaggttggcatccaggtcacgccag

SEQ ID NO: 1181 - RNA, 25 nt, synthetic construct
  misc_feature 1..25: note = Description of Artificial Sequence: Synthetic oligonucleotide
  source 1..25: mol_type = other RNA
tccaatcccgtggaggttggcatcc

SEQ ID NO: 1182 - RNA, 25 nt, synthetic construct
  misc_feature 1..25: note = Description of Artificial Sequence: Synthetic oligonucleotide
  source 1..25: mol_type = other RNA
aaaaagcatccaatcccgtggaggt

SEQ ID NO: 1183 - RNA, 25 nt, synthetic construct
  misc_feature 1..25: note = Description of Artificial Sequence: Synthetic oligonucleotide
  source 1..25: mol_type = other RNA
atgaaaaaagcatccaatcccgtgg

SEQ ID NO: 1184 - RNA, 25 nt, synthetic construct
  misc_feature 1..25: note = Description of Artificial Sequence: Synthetic oligonucleotide
  source 1..25: mol_type = other RNA
gagatgaaaaaagcatccaatcccg

SEQ ID NO: 1185 - RNA, 25 nt, synthetic construct
  misc_feature 1..25: note = Description of Artificial Sequence: Synthetic oligonucleotide
  source 1..25: mol_type = other RNA
ggcagcctctgcttagaaaaagctg

SEQ ID NO: 1186 - RNA, 25 nt, synthetic construct
  misc_feature 1..25: note = Description of Artificial Sequence: Synthetic oligonucleotide
  source 1..25: mol_type = other RNA
tcgagcacaaacggaaacaatgcaa

SEQ ID NO: 1187 - RNA, 25 nt, synthetic construct
  misc_feature 1..25: note = Description of Artificial Sequence: Synthetic oligonucleotide
  source 1..25: mol_type = other RNA
cattcttatttttatcgagcacaaa

SEQ ID NO: 1188 - RNA, 25 nt, synthetic construct
  misc_feature 1..25: note = Description of Artificial Sequence: Synthetic oligonucleotide
  source 1..25: mol_type = other RNA
cagtgccagatgaacttcccattgg

SEQ ID NO: 1189 - RNA, 25 nt, synthetic construct
  misc_feature 1..25: note = Description of Artificial Sequence: Synthetic oligonucleotide
  source 1..25: mol_type = other RNA
gcagtgccagatgaacttcccattg

SEQ ID NO: 1190 - RNA, 25 nt, synthetic construct
  misc_feature 1..25: note = Description of Artificial Sequence: Synthetic oligonucleotide
  source 1..25: mol_type = other RNA
ggcagtgccagatgaacttcccatt

SEQ ID NO: 1191 - RNA, 25 nt, synthetic construct
  misc_feature 1..25: note = Description of Artificial Sequence: Synthetic oligonucleotide
  source 1..25: mol_type = other RNA
gggcagtgccagatgaacttcccat

SEQ ID NO: 1192 - RNA, 25 nt, synthetic construct
  misc_feature 1..25: note = Description of Artificial Sequence: Synthetic oligonucleotide
  source 1..25: mol_type = other RNA
aggggatcatgacctcctcacctgt

SEQ ID NO: 1193 - RNA, 25 nt, synthetic construct
  misc_feature 1..25: note = Description of Artificial Sequence: Synthetic oligonucleotide
  source 1..25: mol_type = other RNA
aaggggatcatgacctcctcacctg

SEQ ID NO: 1194 - RNA, 25 nt, synthetic construct
  misc_feature 1..25: note = Description of Artificial Sequence: Synthetic oligonucleotide
  source 1..25: mol_type = other RNA
cacggcccgttgggagctccagaag

SEQ ID NO: 1195 - RNA, 25 nt, synthetic construct
  misc_feature 1..25: note = Description of Artificial Sequence: Synthetic oligonucleotide
  source 1..25: mol_type = other RNA
ccacggcccgttgggagctccagaa

SEQ ID NO: 1196 - RNA, 25 nt, synthetic construct
  misc_feature 1..25: note = Description of Artificial Sequence: Synthetic oligonucleotide
  source 1..25: mol_type = other RNA
accacggcccgttgggagctccaga

SEQ ID NO: 1197 - RNA, 25 nt, synthetic construct
  misc_feature 1..25: note = Description of Artificial Sequence: Synthetic oligonucleotide
  source 1..25: mol_type = other RNA
atgatgaaccagaccacggcccgtt

SEQ ID NO: 1198 - RNA, 25 nt, synthetic construct
  misc_feature 1..25: note = Description of Artificial Sequence: Synthetic oligonucleotide
  source 1..25: mol_type = other RNA
gatgatgaaccagaccacggcccgt

SEQ ID NO: 1199 - RNA, 25 nt, synthetic construct
  misc_feature 1..25: note = Description of Artificial Sequence: Synthetic oligonucleotide
  source 1..25: mol_type = other RNA
ttcttacagatgatgaaccagacca

SEQ ID NO: 1200 - RNA, 25 nt, synthetic construct
  misc_feature 1..25: note = Description of Artificial Sequence: Synthetic oligonucleotide
  source 1..25: mol_type = other RNA
cgagaattcccgtttgcttaagtgc

SEQ ID NO: 1201 - RNA, 25 nt, synthetic construct
  misc_feature 1..25: note = Description of Artificial Sequence: Synthetic oligonucleotide
  source 1..25: mol_type = other RNA
gagaattcccgtttgcttaagtgct

SEQ ID NO: 1202 - RNA, 25 nt, synthetic construct
  misc_feature 1..25: note = Description of Artificial Sequence: Synthetic oligonucleotide
  source 1..25: mol_type = other RNA
agaattcccgtttgcttaagtgctg

SEQ ID NO: 1203 - RNA, 25 nt, synthetic construct
  misc_feature 1..25: note = Description of Artificial Sequence: Synthetic oligonucleotide
  source 1..25: mol_type = other RNA
taagtgctggggtttgccttgcttg

SEQ ID NO: 1204 - RNA, 25 nt, synthetic construct
  misc_feature 1..25: note = Description of Artificial Sequence: Synthetic oligonucleotide
  source 1..25: mol_type = other RNA
ggtttgccttgcttgcggcgagaca

SEQ ID NO: 1205 - RNA, 25 nt, synthetic construct
  misc_feature 1..25: note = Description of Artificial Sequence: Synthetic oligonucleotide
  source 1..25: mol_type = other RNA
ttgccttgcttgcggcgagacatgg

SEQ ID NO: 1206 - RNA, 25 nt, synthetic construct
  misc_feature 1..25: note = Description of Artificial Sequence: Synthetic oligonucleotide
  source 1..25: mol_type = other RNA
tgccttgcttgcggcgagacatggt

SEQ ID NO: 1207 - RNA, 25 nt, synthetic construct
  misc_feature 1..25: note = Description of Artificial Sequence: Synthetic oligonucleotide
  source 1..25: mol_type = other RNA
gcttgcggcgagacatggtgggctg

SEQ ID NO: 1208 - RNA, 25 nt, synthetic construct
  misc_feature 1..25: note = Description of Artificial Sequence: Synthetic oligonucleotide
  source 1..25: mol_type = other RNA
cttgcggcgagacatggtgggctgc

SEQ ID NO: 1209 - RNA, 25 nt, synthetic construct
  misc_feature 1..25: note = Description of Artificial Sequence: Synthetic oligonucleotide
  source 1..25: mol_type = other RNA
ttgcggcgagacatggtgggctgcg

SEQ ID NO: 1210 - RNA, 25 nt, synthetic construct
  misc_feature 1..25: note = Description of Artificial Sequence: Synthetic oligonucleotide
  source 1..25: mol_type = other RNA
cggcggcggcggcggcggcggcggg

SEQ ID NO: 1211 - RNA, 25 nt, synthetic construct
  misc_feature 1..25: note = Description of Artificial Sequence: Synthetic oligonucleotide
  source 1..25: mol_type = other RNA
ggcggcggcggcggcgggcggacga

SEQ ID NO: 1212 - RNA, 25 nt, synthetic construct
  misc_feature 1..25: note = Description of Artificial Sequence: Synthetic oligonucleotide
  source 1..25: mol_type = other RNA
cggcggcggcgggcggacgacggct

SEQ ID NO: 1213 - RNA, 25 nt, synthetic construct
  misc_feature 1..25: note = Description of Artificial Sequence: Synthetic oligonucleotide
  source 1..25: mol_type = other RNA
gggcggacgacggctcggttcacat

SEQ ID NO: 1214 - RNA, 25 nt, synthetic construct
  misc_feature 1..25: note = Description of Artificial Sequence: Synthetic oligonucleotide
  source 1..25: mol_type = other RNA
ggcggacgacggctcggttcacatc

SEQ ID NO: 1215 - RNA, 25 nt, synthetic construct
  misc_feature 1..25: note = Description of Artificial Sequence: Synthetic oligonucleotide
  source 1..25: mol_type = other RNA
acggctcggttcacatcgggagagc

SEQ ID NO: 1216 - RNA, 25 nt, synthetic construct
  misc_feature 1..25: note = Description of Artificial Sequence: Synthetic oligonucleotide
  source 1..25: mol_type = other RNA
cggctcggttcacatcgggagagcc

SEQ ID NO: 1217 - RNA, 25 nt, synthetic construct
  misc_feature 1..25: note = Description of Artificial Sequence: Synthetic oligonucleotide
  source 1..25: mol_type = other RNA
catcgggagagccgggttagaaaga

SEQ ID NO: 1218 - RNA, 25 nt, synthetic construct
  misc_feature 1..25: note = Description of Artificial Sequence: Synthetic oligonucleotide
  source 1..25: mol_type = other RNA
aaataaattagaaataatacaaaga

SEQ ID NO: 1219 - RNA, 25 nt, synthetic construct
  misc_feature 1..25: note = Description of Artificial Sequence: Synthetic oligonucleotide
  source 1..25: mol_type = other RNA
attagaaataatacaaagatggcgc

SEQ ID NO: 1220 - RNA, 25 nt, synthetic construct
  misc_feature 1..25: note = Description of Artificial Sequence: Synthetic oligonucleotide
  source 1..25: mol_type = other RNA
ttagaaataatacaaagatggcgca

SEQ ID NO: 1221 - RNA, 25 nt, synthetic construct
  misc_feature 1..25: note = Description of Artificial Sequence: Synthetic oligonucleotide
  source 1..25: mol_type = other RNA
aagatggcgcagggaagatgaattg

SEQ ID NO: 1222 - RNA, 25 nt, synthetic construct
  misc_feature 1..25: note = Description of Artificial Sequence: Synthetic oligonucleotide
  source 1..25: mol_type = other RNA
agatggcgcagggaagatgaattgt

SEQ ID NO: 1223 - RNA, 25 nt, synthetic construct
  misc_feature 1..25: note = Description of Artificial Sequence: Synthetic oligonucleotide
  source 1..25: mol_type = other RNA
aagatgaattgtgggagagccgtca

SEQ ID NO: 1224 - RNA, 25 nt, synthetic construct
  misc_feature 1..25: note = Description of Artificial Sequence: Synthetic oligonucleotide
  source 1..25: mol_type = other RNA
ggcaaaccccagcacttaagcaaac

SEQ ID NO: 1225 - RNA, 25 nt, synthetic construct
  misc_feature 1..25: note = Description of Artificial Sequence: Synthetic oligonucleotide
  source 1..25: mol_type = other RNA
aggcaaaccccagcacttaagcaaa

SEQ ID NO: 1226 - RNA, 25 nt, synthetic construct
  misc_feature 1..25: note = Description of Artificial Sequence: Synthetic oligonucleotide
  source 1..25: mol_type = other RNA
agcccaccatgtctcgccgcaagca

SEQ ID NO: 1227 - RNA, 25 nt, synthetic construct
  misc_feature 1..25: note = Description of Artificial Sequence: Synthetic oligonucleotide
  source 1..25: mol_type = other RNA
ctctggagtctccttctttctaacc

SEQ ID NO: 1228 - RNA, 25 nt, synthetic construct
  misc_feature 1..25: note = Description of Artificial Sequence: Synthetic oligonucleotide
  source 1..25: mol_type = other RNA
aaggcactgatgaagatattttctc

SEQ ID NO: 1229 - RNA, 25 nt, synthetic construct
  misc_feature 1..25: note = Description of Artificial Sequence: Synthetic oligonucleotide
  source 1..25: mol_type = other RNA
tttctaatttattttggatgtcaaa

SEQ ID NO: 1230 - RNA, 25 nt, synthetic construct
  misc_feature 1..25: note = Description of Artificial Sequence: Synthetic oligonucleotide
  source 1..25: mol_type = other RNA
tctttgtattatttctaatttattt

SEQ ID NO: 1231 - RNA, 25 nt, synthetic construct
  misc_feature 1..25: note = Description of Artificial Sequence: Synthetic oligonucleotide
  source 1..25: mol_type = other RNA
aaaaaagcttaaaaaaaagccatga

SEQ ID NO: 1232 - RNA, 25 nt, synthetic construct
  misc_feature 1..25: note = Description of Artificial Sequence: Synthetic oligonucleotide
  source 1..25: mol_type = other RNA
gggagtttggcttctcatctgtgca

SEQ ID NO: 1233 - RNA, 25 nt, synthetic construct
  misc_feature 1..25: note = Description of Artificial Sequence: Synthetic oligonucleotide
  source 1..25: mol_type = other RNA
tctcatctgtgcatggcctctaaac

SEQ ID NO: 1234 - RNA, 25 nt, synthetic construct
  misc_feature 1..25: note = Description of Artificial Sequence: Synthetic oligonucleotide
  source 1..25: mol_type = other RNA
ctcatctgtgcatggcctctaaact

SEQ ID NO: 1235 - RNA, 25 nt, synthetic construct
  misc_feature 1..25: note = Description of Artificial Sequence: Synthetic oligonucleotide
  source 1..25: mol_type = other RNA
tggcctctaaactgggcagtgacca

SEQ ID NO: 1236 - RNA, 25 nt, synthetic construct
  misc_feature 1..25: note = Description of Artificial Sequence: Synthetic oligonucleotide
  source 1..25: mol_type = other RNA
tctaaactgggcagtgaccatggcc

SEQ ID NO: 1237 - RNA, 25 nt, synthetic construct
  misc_feature 1..25: note = Description of Artificial Sequence: Synthetic oligonucleotide
  source 1..25: mol_type = other RNA
ccatggcctggtcacctccccactc

SEQ ID NO: 1238 - RNA, 25 nt, synthetic construct
  misc_feature 1..25: note = Description of Artificial Sequence: Synthetic oligonucleotide
  source 1..25: mol_type = other RNA
cctggtcacctccccactctggacc

SEQ ID NO: 1239 - RNA, 25 nt, synthetic construct
  misc_feature 1..25: note = Description of Artificial Sequence: Synthetic oligonucleotide
  source 1..25: mol_type = other RNA
ctggtcacctccccactctggacct

SEQ ID NO: 1240 - RNA, 25 nt, synthetic construct
  misc_feature 1..25: note = Description of Artificial Sequence: Synthetic oligonucleotide
  source 1..25: mol_type = other RNA
gacctgggttgcccctctgtaaaca

SEQ ID NO: 1241 - RNA, 25 nt, synthetic construct
  misc_feature 1..25: note = Description of Artificial Sequence: Synthetic oligonucleotide
  source 1..25: mol_type = other RNA
ctgggttgcccctctgtaaacaagg

SEQ ID NO: 1242 - RNA, 25 nt, synthetic construct
  misc_feature 1..25: note = Description of Artificial Sequence: Synthetic oligonucleotide
  source 1..25: mol_type = other RNA
aaatcttatgcaatttttgccaaga

SEQ ID NO: 1243 - RNA, 25 nt, synthetic construct
  misc_feature 1..25: note = Description of Artificial Sequence: Synthetic oligonucleotide
  source 1..25: mol_type = other RNA
aatcttatgcaatttttgccaagat

SEQ ID NO: 1244 - RNA, 25 nt, synthetic construct
  misc_feature 1..25: note = Description of Artificial Sequence: Synthetic oligonucleotide
  source 1..25: mol_type = other RNA
tgcaatttttgccaagatgggagta

SEQ ID NO: 1245 - RNA, 25 nt, synthetic construct
  misc_feature 1..25: note = Description of Artificial Sequence: Synthetic oligonucleotide
  source 1..25: mol_type = other RNA
gcaatttttgccaagatgggagtat

SEQ ID NO: 1246 - RNA, 25 nt, synthetic construct
  misc_feature 1..25: note = Description of Artificial Sequence: Synthetic oligonucleotide
  source 1..25: mol_type = other RNA
caatttttgccaagatgggagtatg

SEQ ID NO: 1247 - RNA, 25 nt, synthetic construct
  misc_feature 1..25: note = Description of Artificial Sequence: Synthetic oligonucleotide
  source 1..25: mol_type = other RNA
agatgggagtatggggagagaagag

SEQ ID NO: 1248 - RNA, 25 nt, synthetic construct
  misc_feature 1..25: note = Description of Artificial Sequence: Synthetic oligonucleotide
  source 1..25: mol_type = other RNA
gagtatggggagagaagagtggaaa

SEQ ID NO: 1249 - RNA, 25 nt, synthetic construct
  misc_feature 1..25: note = Description of Artificial Sequence: Synthetic oligonucleotide
  source 1..25: mol_type = other RNA
agagctcagtgagatgagatatcaa

SEQ ID NO: 1250 - RNA, 25 nt, synthetic construct
  misc_feature 1..25: note = Description of Artificial Sequence: Synthetic oligonucleotide
  source 1..25: mol_type = other RNA
gagctcagtgagatgagatatcaaa

SEQ ID NO: 1251 - RNA, 25 nt, synthetic construct
  misc_feature 1..25: note = Description of Artificial Sequence: Synthetic oligonucleotide
  source 1..25: mol_type = other RNA
agctcagtgagatgagatatcaaag

SEQ ID NO: 1252 - RNA, 25 nt, synthetic construct
  misc_feature 1..25: note = Description of Artificial Sequence: Synthetic oligonucleotide
  source 1..25: mol_type = other RNA
tcattccatctccctaatctccaat

SEQ ID NO: 1253 - RNA, 25 nt, synthetic construct
  misc_feature 1..25: note = Description of Artificial Sequence: Synthetic oligonucleotide
  source 1..25: mol_type = other RNA
aatctccaattggcaaagccagact

SEQ ID NO: 1254 - RNA, 25 nt, synthetic construct
  misc_feature 1..25: note = Description of Artificial Sequence: Synthetic oligonucleotide
  source 1..25: mol_type = other RNA
atctccaattggcaaagccagactt

SEQ ID NO: 1255 - RNA, 25 nt, synthetic construct
  misc_feature 1..25: note = Description of Artificial Sequence: Synthetic oligonucleotide
  source 1..25: mol_type = other RNA
tctccaattggcaaagccagacttg

SEQ ID NO: 1256 - RNA, 25 nt, synthetic construct
  misc_feature 1..25: note = Description of Artificial Sequence: Synthetic oligonucleotide
  source 1..25: mol_type = other RNA
aagccagacttggggcaatacagac

SEQ ID NO: 1257 - RNA, 25 nt, synthetic construct
  misc_feature 1..25: note = Description of Artificial Sequence: Synthetic oligonucleotide
  source 1..25: mol_type = other RNA
tatcaccaaatgttctttcttcagc

SEQ ID NO: 1258 - RNA, 25 nt, synthetic construct
  misc_feature 1..25: note = Description of Artificial Sequence: Synthetic oligonucleotide
  source 1..25: mol_type = other RNA
ctttcttcagctggaatttaaaata

SEQ ID NO: 1259 - RNA, 25 nt, synthetic construct
  misc_feature 1..25: note = Description of Artificial Sequence: Synthetic oligonucleotide
  source 1..25: mol_type = other RNA
taaaatatggactcatccgtaaaat

SEQ ID NO: 1260 - RNA, 25 nt, synthetic construct
  misc_feature 1..25: note = Description of Artificial Sequence: Synthetic oligonucleotide
  source 1..25: mol_type = other RNA
ggaataataatagtatatgcttcat

SEQ ID NO: 1261 - RNA, 25 nt, synthetic construct
  misc_feature 1..25: note = Description of Artificial Sequence: Synthetic oligonucleotide
  source 1..25: mol_type = other RNA
gaataataatagtatatgcttcata

SEQ ID NO: 1262 - RNA, 25 nt, synthetic construct
  misc_feature 1..25: note = Description of Artificial Sequence: Synthetic oligonucleotide
  source 1..25: mol_type = other RNA
gcttgtgaactaaaatgctgcctcc

SEQ ID NO: 1263 - RNA, 25 nt, synthetic construct
  misc_feature 1..25: note = Description of Artificial Sequence: Synthetic oligonucleotide
  source 1..25: mol_type = other RNA
acacctcagcagaaacaaagttatc

SEQ ID NO: 1264 - RNA, 25 nt, synthetic construct
  misc_feature 1..25: note = Description of Artificial Sequence: Synthetic oligonucleotide
  source 1..25: mol_type = other RNA
caggccctttccccaattcctagtt

SEQ ID NO: 1265 - RNA, 25 nt, synthetic construct
  misc_feature 1..25: note = Description of Artificial Sequence: Synthetic oligonucleotide
  source 1..25: mol_type = other RNA
aggccctttccccaattcctagttt

SEQ ID NO: 1266 - RNA, 25 nt, synthetic construct
  misc_feature 1..25: note = Description of Artificial Sequence: Synthetic oligonucleotide
  source 1..25: mol_type = other RNA
aattcctagtttgggtcagaagaaa

SEQ ID NO: 1267 - RNA, 25 nt, synthetic construct
  misc_feature 1..25: note = Description of Artificial Sequence: Synthetic oligonucleotide
  source 1..25: mol_type = other RNA
attcctagtttgggtcagaagaaaa

SEQ ID NO: 1268 - RNA, 25 nt, synthetic construct
  misc_feature 1..25: note = Description of Artificial Sequence: Synthetic oligonucleotide
  source 1..25: mol_type = other RNA
agtttgggtcagaagaaaagggaaa

SEQ ID NO: 1269 - RNA, 25 nt, synthetic construct
  misc_feature 1..25: note = Description of Artificial Sequence: Synthetic oligonucleotide
  source 1..25: mol_type = other RNA
gtttgggtcagaagaaaagggaaaa

SEQ ID NO: 1270 - RNA, 25 nt, synthetic construct
  misc_feature 1..25: note = Description of Artificial Sequence: Synthetic oligonucleotide
  source 1..25: mol_type = other RNA
ggtcagaagaaaagggaaaagggag

SEQ ID NO: 1271 - RNA, 25 nt, synthetic construct
  misc_feature 1..25: note = Description of Artificial Sequence: Synthetic oligonucleotide
  source 1..25: mol_type = other RNA
agaaaagggaaaagggagaggaaaa

SEQ ID NO: 1272 - RNA, 25 nt, synthetic construct
  misc_feature 1..25: note = Description of Artificial Sequence: Synthetic oligonucleotide
  source 1..25: mol_type = other RNA
ggaaaaaggaaaagaatatgacgtc

SEQ ID NO: 1273 - RNA, 25 nt, synthetic construct
  misc_feature 1..25: note = Description of Artificial Sequence: Synthetic oligonucleotide
  source 1..25: mol_type = other RNA
gaaaaaggaaaagaatatgacgtca

SEQ ID NO: 1274 - RNA, 25 nt, synthetic construct
  misc_feature 1..25: note = Description of Artificial Sequence: Synthetic oligonucleotide
  source 1..25: mol_type = other RNA
aaaaaggaaaagaatatgacgtcag

SEQ ID NO: 1275 - RNA, 25 nt, synthetic construct
  misc_feature 1..25: note = Description of Artificial Sequence: Synthetic oligonucleotide
  source 1..25: mol_type = other RNA
aaaaggaaaagaatatgacgtcagg

SEQ ID NO: 1276 - RNA, 25 nt, synthetic construct
  misc_feature 1..25: note = Description of Artificial Sequence: Synthetic oligonucleotide
  source 1..25: mol_type = other RNA
aggaaaagaatatgacgtcaggggg

SEQ ID NO: 1277 - RNA, 25 nt, synthetic construct
  misc_feature 1..25: note = Description of Artificial Sequence: Synthetic oligonucleotide
  source 1..25: mol_type = other RNA
tgacgtcagggggaggcaagtcagt

SEQ ID NO: 1278 - RNA, 25 nt, synthetic construct
  misc_feature 1..25: note = Description of Artificial Sequence: Synthetic oligonucleotide
  source 1..25: mol_type = other RNA
gacgtcagggggaggcaagtcagtt

SEQ ID NO: 1279 - RNA, 25 nt, synthetic construct
  misc_feature 1..25: note = Description of Artificial Sequence: Synthetic oligonucleotide
  source 1..25: mol_type = other RNA
ggaacacagatcctaacacagtagc

SEQ ID NO: 1280 - RNA, 25 nt, synthetic construct
  misc_feature 1..25: note = Description of Artificial Sequence: Synthetic oligonucleotide
  source 1..25: mol_type = other RNA
cctaacacagtagctggtacctgat

SEQ ID NO: 1281 - RNA, 25 nt, synthetic construct
  misc_feature 1..25: note = Description of Artificial Sequence: Synthetic oligonucleotide
  source 1..25: mol_type = other RNA
gtacctgataggtgcctatatgtga

SEQ ID NO: 1282 - RNA, 25 nt, synthetic construct
  misc_feature 1..25: note = Description of Artificial Sequence: Synthetic oligonucleotide
  source 1..25: mol_type = other RNA
ctgataggtgcctatatgtgatgga

SEQ ID NO: 1283 - RNA, 25 nt, synthetic construct
  misc_feature 1..25: note = Description of Artificial Sequence: Synthetic oligonucleotide
  source 1..25: mol_type = other RNA
tgataggtgcctatatgtgatggat

SEQ ID NO: 1284 - RNA, 25 nt, synthetic construct
  misc_feature 1..25: note = Description of Artificial Sequence: Synthetic oligonucleotide
  source 1..25: mol_type = other RNA
taggtgcctatatgtgatggatggg

SEQ ID NO: 1285 - RNA, 25 nt, synthetic construct
  misc_feature 1..25: note = Description of Artificial Sequence: Synthetic oligonucleotide
  source 1..25: mol_type = other RNA
ggtggacagcccgacagatgaaaaa

SEQ ID NO: 1286 - RNA, 25 nt, synthetic construct
  misc_feature 1..25: note = Description of Artificial Sequence: Synthetic oligonucleotide
  source 1..25: mol_type = other RNA
gacagatgaaaaatggacaattatg

SEQ ID NO: 1287 - RNA, 25 nt, synthetic construct
  misc_feature 1..25: note = Description of Artificial Sequence: Synthetic oligonucleotide
  source 1..25: mol_type = other RNA
agatgaaaaatggacaattatgagg

SEQ ID NO: 1288 - RNA, 25 nt, synthetic construct
  misc_feature 1..25: note = Description of Artificial Sequence: Synthetic oligonucleotide
  source 1..25: mol_type = other RNA
gatgaaaaatggacaattatgagga

SEQ ID NO: 1289 - RNA, 25 nt, synthetic construct
  misc_feature 1..25: note = Description of Artificial Sequence: Synthetic oligonucleotide
  source 1..25: mol_type = other RNA
atgaaaaatggacaattatgaggag

SEQ ID NO: 1290 - RNA, 25 nt, synthetic construct
  misc_feature 1..25: note = Description of Artificial Sequence: Synthetic oligonucleotide
  source 1..25: mol_type = other RNA
attatgaggaggggagagtgcagac

SEQ ID NO: 1291 - RNA, 25 nt, synthetic construct
  misc_feature 1..25: note = Description of Artificial Sequence: Synthetic oligonucleotide
  source 1..25: mol_type = other RNA
ttatgaggaggggagagtgcagaca

SEQ ID NO: 1292 - RNA, 25 nt, synthetic construct
  misc_feature 1..25: note = Description of Artificial Sequence: Synthetic oligonucleotide
  source 1..25: mol_type = other RNA
tatgaggaggggagagtgcagacag

SEQ ID NO: 1293 - RNA, 25 nt, synthetic construct
  misc_feature 1..25: note = Description of Artificial Sequence: Synthetic oligonucleotide
  source 1..25: mol_type = other RNA
ggaagcttcacctcctttacaattt

SEQ ID NO: 1294 - RNA, 25 nt, synthetic construct
  misc_feature 1..25: note = Description of Artificial Sequence: Synthetic oligonucleotide
  source 1..25: mol_type = other RNA
gaagcttcacctcctttacaatttt

SEQ ID NO: 1295 - RNA, 25 nt, synthetic construct
  misc_feature 1..25: note = Description of Artificial Sequence: Synthetic oligonucleotide
  source 1..25: mol_type = other RNA
tcctttacaattttgggagtccaca

SEQ ID NO: 1296 - RNA, 25 nt, synthetic construct
  misc_feature 1..25: note = Description of Artificial Sequence: Synthetic oligonucleotide
  source 1..25: mol_type = other RNA
tacaattttgggagtccacacggca

SEQ ID NO: 1297 - RNA, 25 nt, synthetic construct
  misc_feature 1..25: note = Description of Artificial Sequence: Synthetic oligonucleotide
  source 1..25: mol_type = other RNA
catcaccaagagagccttccgaaag

SEQ ID NO: 1298 - RNA, 25 nt, synthetic construct
  misc_feature 1..25: note = Description of Artificial Sequence: Synthetic oligonucleotide
  source 1..25: mol_type = other RNA
gagagccttccgaaagaggcccccc

SEQ ID NO: 1299 - RNA, 25 nt, synthetic construct
  misc_feature 1..25: note = Description of Artificial Sequence: Synthetic oligonucleotide
  source 1..25: mol_type = other RNA
agagccttccgaaagaggcccccct

SEQ ID NO: 1300 - RNA, 25 nt, synthetic construct
  misc_feature 1..25: note = Description of Artificial Sequence: Synthetic oligonucleotide
  source 1..25: mol_type = other RNA
tccgaaagaggcccccctgggcaaa

SEQ ID NO: 1301 - RNA, 25 nt, synthetic construct
  misc_feature 1..25: note = Description of Artificial Sequence: Synthetic oligonucleotide
  source 1..25: mol_type = other RNA
gcccccctgggcaaacggccaccga

SEQ ID NO: 1302 - RNA, 25 nt, synthetic construct
  misc_feature 1..25: note = Description of Artificial Sequence: Synthetic oligonucleotide
  source 1..25: mol_type = other RNA
cctgggcaaacggccaccgatggag

SEQ ID NO: 1303 - RNA, 25 nt, synthetic construct
  misc_feature 1..25: note = Description of Artificial Sequence: Synthetic oligonucleotide
  source 1..25: mol_type = other RNA
ccacccacgcccccaccctaatcag

SEQ ID NO: 1304 - RNA, 25 nt, synthetic construct
  misc_feature 1..25: note = Description of Artificial Sequence: Synthetic oligonucleotide
  source 1..25: mol_type = other RNA
ccctaatcagaggccaaacccttcc

SEQ ID NO: 1305 - RNA, 25 nt, synthetic construct
  misc_feature 1..25: note = Description of Artificial Sequence: Synthetic oligonucleotide
  source 1..25: mol_type = other RNA
actagcttcaaagttgtattgaccc

SEQ ID NO: 1306 - RNA, 25 nt, synthetic construct
  misc_feature 1..25: note = Description of Artificial Sequence: Synthetic oligonucleotide
  source 1..25: mol_type = other RNA
aagagtagatgccatatctcttttc

SEQ ID NO: 1307 - RNA, 25 nt, synthetic construct
  misc_feature 1..25: note = Description of Artificial Sequence: Synthetic oligonucleotide
  source 1..25: mol_type = other RNA
tttctggcctatgttattacctgta

SEQ ID NO: 1308 - RNA, 25 nt, synthetic construct
  misc_feature 1..25: note = Description of Artificial Sequence: Synthetic oligonucleotide
  source 1..25: mol_type = other RNA
gttattacctgtatggactttgcac

SEQ ID NO: 1309 - RNA, 25 nt, synthetic construct
  misc_feature 1..25: note = Description of Artificial Sequence: Synthetic oligonucleotide
  source 1..25: mol_type = other RNA
ctatctgctcttacttatgcacacc

SEQ ID NO: 1310 - RNA, 25 nt, synthetic construct
  misc_feature 1..25: note = Description of Artificial Sequence: Synthetic oligonucleotide
  source 1..25: mol_type = other RNA
tatctgctcttacttatgcacacct

SEQ ID NO: 1311 - RNA, 25 nt, synthetic construct
  misc_feature 1..25: note = Description of Artificial Sequence: Synthetic oligonucleotide
  source 1..25: mol_type = other RNA
atctgctcttacttatgcacacctg

SEQ ID NO: 1312 - RNA, 25 nt, synthetic construct
  misc_feature 1..25: note = Description of Artificial Sequence: Synthetic oligonucleotide
  source 1..25: mol_type = other RNA
cctgtctagctgccttccttatcac

SEQ ID NO: 1313 - RNA, 25 nt, synthetic construct
  misc_feature 1..25: note = Description of Artificial Sequence: Synthetic oligonucleotide
  source 1..25: mol_type = other RNA
ttccttatcacaggaatagcaccca

SEQ ID NO: 1314 - RNA, 25 nt, synthetic construct
  misc_feature 1..25: note = Description of Artificial Sequence: Synthetic oligonucleotide
  source 1..25: mol_type = other RNA
gagtagaaccccctataaactagtc

SEQ ID NO: 1315 - RNA, 25 nt, synthetic construct
  misc_feature 1..25: note = Description of Artificial Sequence: Synthetic oligonucleotide
  source 1..25: mol_type = other RNA
cctataaactagtctggtttgccca

SEQ ID NO: 1316 - RNA, 25 nt, synthetic construct
  misc_feature 1..25: note = Description of Artificial Sequence: Synthetic oligonucleotide
  source 1..25: mol_type = other RNA
ctataaactagtctggtttgcccat

SEQ ID NO: 1317 - RNA, 25 nt, synthetic construct
  misc_feature 1..25: note = Description of Artificial Sequence: Synthetic oligonucleotide
  source 1..25: mol_type = other RNA
tataaactagtctggtttgcccatg

SEQ ID NO: 1318 - RNA, 25 nt, synthetic construct
  misc_feature 1..25: note = Description of Artificial Sequence: Synthetic oligonucleotide
  source 1..25: mol_type = other RNA
tctggtttgcccatggggcacagtc

SEQ ID NO: 1319 - RNA, 25 nt, synthetic construct
  misc_feature 1..25: note = Description of Artificial Sequence: Synthetic oligonucleotide
  source 1..25: mol_type = other RNA
atggggcacagtcaggctgttttcc

SEQ ID NO: 1320 - RNA, 25 nt, synthetic construct
  misc_feature 1..25: note = Description of Artificial Sequence: Synthetic oligonucleotide
  source 1..25: mol_type = other RNA
tggggcacagtcaggctgttttcca

SEQ ID NO: 1321 - RNA, 25 nt, synthetic construct
  misc_feature 1..25: note = Description of Artificial Sequence: Synthetic oligonucleotide
  source 1..25: mol_type = other RNA
ggcacagtcaggctgttttccaggg

SEQ ID NO: 1322 - RNA, 25 nt, synthetic construct
  misc_feature 1..25: note = Description of Artificial Sequence: Synthetic oligonucleotide
  source 1..25: mol_type = other RNA
gcacagtcaggctgttttccagggt

SEQ ID NO: 1323 - RNA, 25 nt, synthetic construct
  misc_feature 1..25: note = Description of Artificial Sequence: Synthetic oligonucleotide
  source 1..25: mol_type = other RNA
cacagtcaggctgttttccagggtg

SEQ ID NO: 1324 - RNA, 25 nt, synthetic construct
  misc_feature 1..25: note = Description of Artificial Sequence: Synthetic oligonucleotide
  source 1..25: mol_type = other RNA
acacacgtatgtgttgtgatccctg

SEQ ID NO: 1325 - RNA, 25 nt, synthetic construct
  misc_feature 1..25: note = Description of Artificial Sequence: Synthetic oligonucleotide
  source 1..25: mol_type = other RNA
ttgtgatccctgtggtttgagagtt

SEQ ID NO: 1326 - RNA, 25 nt, synthetic construct
  misc_feature 1..25: note = Description of Artificial Sequence: Synthetic oligonucleotide
  source 1..25: mol_type = other RNA
tccctaaaagtcaaaatattctcaa

SEQ ID NO: 1327 - RNA, 25 nt, synthetic construct
  misc_feature 1..25: note = Description of Artificial Sequence: Synthetic oligonucleotide
  source 1..25: mol_type = other RNA
ccctaaaagtcaaaatattctcaat

SEQ ID NO: 1328 - RNA, 25 nt, synthetic construct
  misc_feature 1..25: note = Description of Artificial Sequence: Synthetic oligonucleotide
  source 1..25: mol_type = other RNA
ccctcaatcagcacatacacacaaa

SEQ ID NO: 1329 - RNA, 25 nt, synthetic construct
  misc_feature 1..25: note = Description of Artificial Sequence: Synthetic oligonucleotide
  source 1..25: mol_type = other RNA
tcagcacatacacacaaaaggtacc

SEQ ID NO: 1330 - RNA, 25 nt, synthetic construct
  misc_feature 1..25: note = Description of Artificial Sequence: Synthetic oligonucleotide
  source 1..25: mol_type = other RNA
tgtaattcttttcctgctcaaagac

SEQ ID NO: 1331 - RNA, 25 nt, synthetic construct
  misc_feature 1..25: note = Description of Artificial Sequence: Synthetic oligonucleotide
  source 1..25: mol_type = other RNA
ccccaaccaaaaacccttgccacca

SEQ ID NO: 1332 - RNA, 25 nt, synthetic construct
  misc_feature 1..25: note = Description of Artificial Sequence: Synthetic oligonucleotide
  source 1..25: mol_type = other RNA
cccaaccaaaaacccttgccaccat

SEQ ID NO: 1333 - RNA, 25 nt, synthetic construct
  misc_feature 1..25: note = Description of Artificial Sequence: Synthetic oligonucleotide
  source 1..25: mol_type = other RNA
aaaaacccttgccaccatgggagcc

SEQ ID NO: 1334 - RNA, 25 nt, synthetic construct
  misc_feature 1..25: note = Description of Artificial Sequence: Synthetic oligonucleotide
  source 1..25: mol_type = other RNA
aaaacccttgccaccatgggagcct

SEQ ID NO: 1335 - RNA, 25 nt, synthetic construct
  misc_feature 1..25: note = Description of Artificial Sequence: Synthetic oligonucleotide
  source 1..25: mol_type = other RNA
aaacccttgccaccatgggagcctg

SEQ ID NO: 1336 - RNA, 25 nt, synthetic construct
  misc_feature 1..25: note = Description of Artificial Sequence: Synthetic oligonucleotide
  source 1..25: mol_type = other RNA
ccaccatgggagcctggggcagaga

SEQ ID NO: 1337 - RNA, 25 nt, synthetic construct
  misc_feature 1..25: note = Description of Artificial Sequence: Synthetic oligonucleotide
  source 1..25: mol_type = other RNA
cacagtgaagtcaaactgtaattcc

SEQ ID NO: 1338 - RNA, 25 nt, synthetic construct
  misc_feature 1..25: note = Description of Artificial Sequence: Synthetic oligonucleotide
  source 1..25: mol_type = other RNA
tcaaactgtaattccaggctctaaa

SEQ ID NO: 1339 - RNA, 25 nt, synthetic construct
  misc_feature 1..25: note = Description of Artificial Sequence: Synthetic oligonucleotide
  source 1..25: mol_type = other RNA
tttttctgagagtctctaaattaca

SEQ ID NO: 1340 - RNA, 25 nt, synthetic construct
  misc_feature 1..25: note = Description of Artificial Sequence: Synthetic oligonucleotide
  source 1..25: mol_type = other RNA
ttttctgagagtctctaaattacaa

SEQ ID NO: 1341 - RNA, 25 nt, synthetic construct
  misc_feature 1..25: note = Description of Artificial Sequence: Synthetic oligonucleotide
  source 1..25: mol_type = other RNA
acacctaagaaacatactgcagctc

SEQ ID NO: 1342 - RNA, 25 nt, synthetic construct
  misc_feature 1..25: note = Description of Artificial Sequence: Synthetic oligonucleotide
  source 1..25: mol_type = other RNA
aaagagaacaaacaaaccaaagaga

SEQ ID NO: 1343 - RNA, 25 nt, synthetic construct
  misc_feature 1..25: note = Description of Artificial Sequence: Synthetic oligonucleotide
  source 1..25: mol_type = other RNA
aagagaacaaacaaaccaaagagaa

SEQ ID NO: 1344 - RNA, 25 nt, synthetic construct
  misc_feature 1..25: note = Description of Artificial Sequence: Synthetic oligonucleotide
  source 1..25: mol_type = other RNA
aacaaaccaaagagaagggatccag

SEQ ID NO: 1345 - RNA, 25 nt, synthetic construct
  misc_feature 1..25: note = Description of Artificial Sequence: Synthetic oligonucleotide
  source 1..25: mol_type = other RNA
tatgtgaaaagtcaattgataatga

SEQ ID NO: 1346 - RNA, 25 nt, synthetic construct
  misc_feature 1..25: note = Description of Artificial Sequence: Synthetic oligonucleotide
  source 1..25: mol_type = other RNA
aaagtcaattgataatgaaggcttt

SEQ ID NO: 1347 - RNA, 25 nt, synthetic construct
  misc_feature 1..25: note = Description of Artificial Sequence: Synthetic oligonucleotide
  source 1..25: mol_type = other RNA
ttgataatgaaggctttaggataac

SEQ ID NO: 1348 - RNA, 25 nt, synthetic construct
  misc_feature 1..25: note = Description of Artificial Sequence: Synthetic oligonucleotide
  source 1..25: mol_type = other RNA
ataatgaaggctttaggataaccgg

SEQ ID NO: 1349 - RNA, 25 nt, synthetic construct
  misc_feature 1..25: note = Description of Artificial Sequence: Synthetic oligonucleotide
  source 1..25: mol_type = other RNA
taatgaaggctttaggataaccgga

SEQ ID NO: 1350 - RNA, 25 nt, synthetic construct
  misc_feature 1..25: note = Description of Artificial Sequence: Synthetic oligonucleotide
  source 1..25: mol_type = other RNA
aatgaaggctttaggataaccggag

SEQ ID NO: 1351 - RNA, 25 nt, synthetic construct
  misc_feature 1..25: note = Description of Artificial Sequence: Synthetic oligonucleotide
  source 1..25: mol_type = other RNA
atgattgaaagcaatgcacctgtgc

SEQ ID NO: 1352 - RNA, 25 nt, synthetic construct
  misc_feature 1..25: note = Description of Artificial Sequence: Synthetic oligonucleotide
  source 1..25: mol_type = other RNA
gaaagcaatgcacctgtgcaggaaa

SEQ ID NO: 1353 - RNA, 25 nt, synthetic construct
  misc_feature 1..25: note = Description of Artificial Sequence: Synthetic oligonucleotide
  source 1..25: mol_type = other RNA
atgcacctgtgcaggaaatggatta

SEQ ID NO: 1354 - RNA, 25 nt, synthetic construct
  misc_feature 1..25: note = Description of Artificial Sequence: Synthetic oligonucleotide
  source 1..25: mol_type = other RNA
tgtgcaggaaatggattacggaaac

SEQ ID NO: 1355 - RNA, 25 nt, synthetic construct
  misc_feature 1..25: note = Description of Artificial Sequence: Synthetic oligonucleotide
  source 1..25: mol_type = other RNA
gtgcaggaaatggattacggaaaca

SEQ ID NO: 1356 - RNA, 25 nt, synthetic construct
  misc_feature 1..25: note = Description of Artificial Sequence: Synthetic oligonucleotide
  source 1..25: mol_type = other RNA
tcatgaaatcccagaaaaccagaac

SEQ ID NO: 1357 - RNA, 25 nt, synthetic construct
  misc_feature 1..25: note = Description of Artificial Sequence: Synthetic oligonucleotide
  source 1..25: mol_type = other RNA
catgaaatcccagaaaaccagaacc

SEQ ID NO: 1358 - RNA, 25 nt, synthetic construct
  misc_feature 1..25: note = Description of Artificial Sequence: Synthetic oligonucleotide
  source 1..25: mol_type = other RNA
cagaaaaccagaaccgggaaagttc

SEQ ID NO: 1359 - RNA, 25 nt, synthetic construct
  misc_feature 1..25: note = Description of Artificial Sequence: Synthetic oligonucleotide
  source 1..25: mol_type = other RNA
ccagaaccgggaaagttctggaagt

SEQ ID NO: 1360 - RNA, 25 nt, synthetic construct
  misc_feature 1..25: note = Description of Artificial Sequence: Synthetic oligonucleotide
  source 1..25: mol_type = other RNA
gaaaaacaaatcatgacttaagcaa

SEQ ID NO: 1361 - RNA, 25 nt, synthetic construct
  misc_feature 1..25: note = Description of Artificial Sequence: Synthetic oligonucleotide
  source 1..25: mol_type = other RNA
cgtttacagaatgccttgtcccacg

SEQ ID NO: 1362 - RNA, 25 nt, synthetic construct
  misc_feature 1..25: note = Description of Artificial Sequence: Synthetic oligonucleotide
  source 1..25: mol_type = other RNA
aggccatggtcactgcccagtttag

SEQ ID NO: 1363 - RNA, 25 nt, synthetic construct
  misc_feature 1..25: note = Description of Artificial Sequence: Synthetic oligonucleotide
  source 1..25: mol_type = other RNA
ccagagtggggaggtgaccaggcca

SEQ ID NO: 1364 - RNA, 25 nt, synthetic construct
  misc_feature 1..25: note = Description of Artificial Sequence: Synthetic oligonucleotide
  source 1..25: mol_type = other RNA
ccaggtccagagtggggaggtgacc

SEQ ID NO: 1365 - RNA, 25 nt, synthetic construct
  misc_feature 1..25: note = Description of Artificial Sequence: Synthetic oligonucleotide
  source 1..25: mol_type = other RNA
ggggcaacccaggtccagagtgggg

SEQ ID NO: 1366 - RNA, 25 nt, synthetic construct
  misc_feature 1..25: note = Description of Artificial Sequence: Synthetic oligonucleotide
  source 1..25: mol_type = other RNA
agaggggcaacccaggtccagagtg

SEQ ID NO: 1367 - RNA, 25 nt, synthetic construct
  misc_feature 1..25: note = Description of Artificial Sequence: Synthetic oligonucleotide
  source 1..25: mol_type = other RNA
cagaggggcaacccaggtccagagt

SEQ ID NO: 1368 - RNA, 25 nt, synthetic construct
  misc_feature 1..25: note = Description of Artificial Sequence: Synthetic oligonucleotide
  source 1..25: mol_type = other RNA
acagaggggcaacccaggtccagag

SEQ ID NO: 1369 - RNA, 25 nt, synthetic construct
  misc_feature 1..25: note = Description of Artificial Sequence: Synthetic oligonucleotide
  source 1..25: mol_type = other RNA
ctccttgtttacagaggggcaaccc

SEQ ID NO: 1370 - RNA, 25 nt, synthetic construct
  misc_feature 1..25: note = Description of Artificial Sequence: Synthetic oligonucleotide
  source 1..25: mol_type = other RNA
tattacaacctccttgtttacagag

SEQ ID NO: 1371 - RNA, 25 nt, synthetic construct
  misc_feature 1..25: note = Description of Artificial Sequence: Synthetic oligonucleotide
  source 1..25: mol_type = other RNA
ttattacaacctccttgtttacaga

SEQ ID NO: 1372 - RNA, 25 nt, synthetic construct
  misc_feature 1..25: note = Description of Artificial Sequence: Synthetic oligonucleotide
  source 1..25: mol_type = other RNA
tttattacaacctccttgtttacag

SEQ ID NO: 1373 - RNA, 25 nt, synthetic construct
  misc_feature 1..25: note = Description of Artificial Sequence: Synthetic oligonucleotide
  source 1..25: mol_type = other RNA
taagatttataagacattagggtat

SEQ ID NO: 1374 - RNA, 25 nt, synthetic construct
  misc_feature 1..25: note = Description of Artificial Sequence: Synthetic oligonucleotide
  source 1..25: mol_type = other RNA
attgcataagatttataagacatta

SEQ ID NO: 1375 - RNA, 25 nt, synthetic construct
  misc_feature 1..25: note = Description of Artificial Sequence: Synthetic oligonucleotide
  source 1..25: mol_type = other RNA
aattgcataagatttataagacatt

SEQ ID NO: 1376 - RNA, 25 nt, synthetic construct
  misc_feature 1..25: note = Description of Artificial Sequence: Synthetic oligonucleotide
  source 1..25: mol_type = other RNA
ctcttctctccccatactcccatct

SEQ ID NO: 1377 - RNA, 25 nt, synthetic construct
  misc_feature 1..25: note = Description of Artificial Sequence: Synthetic oligonucleotide
  source 1..25: mol_type = other RNA
ttgatatctcatctcactgagctct

SEQ ID NO: 1378 - RNA, 25 nt, synthetic construct
  misc_feature 1..25: note = Description of Artificial Sequence: Synthetic oligonucleotide
  source 1..25: mol_type = other RNA
tttgatatctcatctcactgagctc

SEQ ID NO: 1379 - RNA, 25 nt, synthetic construct
  misc_feature 1..25: note = Description of Artificial Sequence: Synthetic oligonucleotide
  source 1..25: mol_type = other RNA
ctttgccaattggagattagggaga

SEQ ID NO: 1380 - RNA, 25 nt, synthetic construct
  misc_feature 1..25: note = Description of Artificial Sequence: Synthetic oligonucleotide
  source 1..25: mol_type = other RNA
gtctggctttgccaattggagatta

SEQ ID NO: 1381 - RNA, 25 nt, synthetic construct
  misc_feature 1..25: note = Description of Artificial Sequence: Synthetic oligonucleotide
  source 1..25: mol_type = other RNA
agtctggctttgccaattggagatt

SEQ ID NO: 1382 - RNA, 25 nt, synthetic construct
  misc_feature 1..25: note = Description of Artificial Sequence: Synthetic oligonucleotide
  source 1..25: mol_type = other RNA
ttgccccaagtctggctttgccaat

SEQ ID NO: 1383 - RNA, 25 nt, synthetic construct
  misc_feature 1..25: note = Description of Artificial Sequence: Synthetic oligonucleotide
  source 1..25: mol_type = other RNA
gaaccagtctgtattgccccaagtc

SEQ ID NO: 1384 - RNA, 25 nt, synthetic construct
  misc_feature 1..25: note = Description of Artificial Sequence: Synthetic oligonucleotide
  source 1..25: mol_type = other RNA
ggtgataaatcattaggaatgagct

SEQ ID NO: 1385 - RNA, 25 nt, synthetic construct
  misc_feature 1..25: note = Description of Artificial Sequence: Synthetic oligonucleotide
  source 1..25: mol_type = other RNA
aaagaacatttggtgataaatcatt

SEQ ID NO: 1386 - RNA, 25 nt, synthetic construct
  misc_feature 1..25: note = Description of Artificial Sequence: Synthetic oligonucleotide
  source 1..25: mol_type = other RNA
aaattccagctgaagaaagaacatt

SEQ ID NO: 1387 - RNA, 25 nt, synthetic construct
  misc_feature 1..25: note = Description of Artificial Sequence: Synthetic oligonucleotide
  source 1..25: mol_type = other RNA
atatactattattattcctatttta

SEQ ID NO: 1388 - RNA, 25 nt, synthetic construct
  misc_feature 1..25: note = Description of Artificial Sequence: Synthetic oligonucleotide
  source 1..25: mol_type = other RNA
aagctcggagcacttactctgctct

SEQ ID NO: 1389 - RNA, 25 nt, synthetic construct
  misc_feature 1..25: note = Description of Artificial Sequence: Synthetic oligonucleotide
  source 1..25: mol_type = other RNA
gaggcagcattttagttcacaagct

SEQ ID NO: 1390 - RNA, 25 nt, synthetic construct
  misc_feature 1..25: note = Description of Artificial Sequence: Synthetic oligonucleotide
  source 1..25: mol_type = other RNA
tgaggtgtaactaataaataccagg

SEQ ID NO: 1391 - RNA, 25 nt, synthetic construct
  misc_feature 1..25: note = Description of Artificial Sequence: Synthetic oligonucleotide
  source 1..25: mol_type = other RNA
tgctgaggtgtaactaataaatacc

SEQ ID NO: 1392 - RNA, 25 nt, synthetic construct
  misc_feature 1..25: note = Description of Artificial Sequence: Synthetic oligonucleotide
  source 1..25: mol_type = other RNA
gggcctgataactttgtttctgctg

SEQ ID NO: 1393 - RNA, 25 nt, synthetic construct
  misc_feature 1..25: note = Description of Artificial Sequence: Synthetic oligonucleotide
  source 1..25: mol_type = other RNA
tgacccaaactaggaattggggaaa

SEQ ID NO: 1394 - RNA, 25 nt, synthetic construct
  misc_feature 1..25: note = Description of Artificial Sequence: Synthetic oligonucleotide
  source 1..25: mol_type = other RNA
ctgacccaaactaggaattggggaa

SEQ ID NO: 1395 - RNA, 25 nt, synthetic construct
  misc_feature 1..25: note = Description of Artificial Sequence: Synthetic oligonucleotide
  source 1..25: mol_type = other RNA
ttcttctgacccaaactaggaattg

SEQ ID NO: 1396 - RNA, 25 nt, synthetic construct
  misc_feature 1..25: note = Description of Artificial Sequence: Synthetic oligonucleotide
  source 1..25: mol_type = other RNA
tttcttctgacccaaactaggaatt

SEQ ID NO: 1397 - RNA, 25 nt, synthetic construct
  misc_feature 1..25: note = Description of Artificial Sequence: Synthetic oligonucleotide
  source 1..25: mol_type = other RNA
ttttcttctgacccaaactaggaat

SEQ ID NO: 1398 - RNA, 25 nt, synthetic construct
  misc_feature 1..25: note = Description of Artificial Sequence: Synthetic oligonucleotide
  source 1..25: mol_type = other RNA
tttcccttttcttctgacccaaact

SEQ ID NO: 1399 - RNA, 25 nt, synthetic construct
  misc_feature 1..25: note = Description of Artificial Sequence: Synthetic oligonucleotide
  source 1..25: mol_type = other RNA
cctatcaggtaccagctactgtgtt

SEQ ID NO: 1400 - RNA, 25 nt, synthetic construct
  misc_feature 1..25: note = Description of Artificial Sequence: Synthetic oligonucleotide
  source 1..25: mol_type = other RNA
catccatcacatataggcacctatc

SEQ ID NO: 1401 - RNA, 25 nt, synthetic construct
  misc_feature 1..25: note = Description of Artificial Sequence: Synthetic oligonucleotide
  source 1..25: mol_type = other RNA
ggctgtccacccatccatcacatat

SEQ ID NO: 1402 - RNA, 25 nt, synthetic construct
  misc_feature 1..25: note = Description of Artificial Sequence: Synthetic oligonucleotide
  source 1..25: mol_type = other RNA
cataattgtccatttttcatctgtc

SEQ ID NO: 1403 - RNA, 25 nt, synthetic construct
  misc_feature 1..25: note = Description of Artificial Sequence: Synthetic oligonucleotide
  source 1..25: mol_type = other RNA
tcataattgtccatttttcatctgt

SEQ ID NO: 1404 - RNA, 25 nt, synthetic construct
  misc_feature 1..25: note = Description of Artificial Sequence: Synthetic oligonucleotide
  source 1..25: mol_type = other RNA
gtgtggactcccaaaattgtaaagg

SEQ ID NO: 1405 - RNA, 25 nt, synthetic construct
  misc_feature 1..25: note = Description of Artificial Sequence: Synthetic oligonucleotide
  source 1..25: mol_type = other RNA
gccgtgtggactcccaaaattgtaa

SEQ ID NO: 1406 - RNA, 25 nt, synthetic construct
  misc_feature 1..25: note = Description of Artificial Sequence: Synthetic oligonucleotide
  source 1..25: mol_type = other RNA
gaaataatttgtatgccatgccgtg

SEQ ID NO: 1407 - RNA, 25 nt, synthetic construct
  misc_feature 1..25: note = Description of Artificial Sequence: Synthetic oligonucleotide
  source 1..25: mol_type = other RNA
ggagaattggattttatttctcaat

SEQ ID NO: 1408 - RNA, 25 nt, synthetic construct
  misc_feature 1..25: note = Description of Artificial Sequence: Synthetic oligonucleotide
  source 1..25: mol_type = other RNA
tggagaattggattttatttctcaa

SEQ ID NO: 1409 - RNA, 25 nt, synthetic construct
  misc_feature 1..25: note = Description of Artificial Sequence: Synthetic oligonucleotide
  source 1..25: mol_type = other RNA
gaaggctctcttggtgatggagaat

SEQ ID NO: 1410 - RNA, 25 nt, synthetic construct
  misc_feature 1..25: note = Description of Artificial Sequence: Synthetic oligonucleotide
  source 1..25: mol_type = other RNA
ctctttcggaaggctctcttggtga

SEQ ID NO: 1411 - RNA, 25 nt, synthetic construct
  misc_feature 1..25: note = Description of Artificial Sequence: Synthetic oligonucleotide
  source 1..25: mol_type = other RNA
gggggcctctttcggaaggctctct

SEQ ID NO: 1412 - RNA, 25 nt, synthetic construct
  misc_feature 1..25: note = Description of Artificial Sequence: Synthetic oligonucleotide
  source 1..25: mol_type = other RNA
tttgcccaggggggcctctttcgga

SEQ ID NO: 1413 - RNA, 25 nt, synthetic construct
  misc_feature 1..25: note = Description of Artificial Sequence: Synthetic oligonucleotide
  source 1..25: mol_type = other RNA
gccgtttgcccaggggggcctcttt

SEQ ID NO: 1414 - RNA, 25 nt, synthetic construct
  misc_feature 1..25: note = Description of Artificial Sequence: Synthetic oligonucleotide
  source 1..25: mol_type = other RNA
tccatcggtggccgtttgcccaggg

SEQ ID NO: 1415 - RNA, 25 nt, synthetic construct
  misc_feature 1..25: note = Description of Artificial Sequence: Synthetic oligonucleotide
  source 1..25: mol_type = other RNA
ctccatcggtggccgtttgcccagg

SEQ ID NO: 1416 - RNA, 25 nt, synthetic construct
  misc_feature 1..25: note = Description of Artificial Sequence: Synthetic oligonucleotide
  source 1..25: mol_type = other RNA
tctccatcggtggccgtttgcccag

SEQ ID NO: 1417 - RNA, 25 nt, synthetic construct
  misc_feature 1..25: note = Description of Artificial Sequence: Synthetic oligonucleotide
  source 1..25: mol_type = other RNA
ctctccatcggtggccgtttgccca

SEQ ID NO: 1418 - RNA, 25 nt, synthetic construct
  misc_feature 1..25: note = Description of Artificial Sequence: Synthetic oligonucleotide
  source 1..25: mol_type = other RNA
cctctccatcggtggccgtttgccc

SEQ ID NO: 1419 - RNA, 25 nt, synthetic construct
  misc_feature 1..25: note = Description of Artificial Sequence: Synthetic oligonucleotide
  source 1..25: mol_type = other RNA
gaggactggcagacctctccatcgg

SEQ ID NO: 1420 - RNA, 25 nt, synthetic construct
  misc_feature 1..25: note = Description of Artificial Sequence: Synthetic oligonucleotide
  source 1..25: mol_type = other RNA
gaagaggactggcagacctctccat

SEQ ID NO: 1421 - RNA, 25 nt, synthetic construct
  misc_feature 1..25: note = Description of Artificial Sequence: Synthetic oligonucleotide
  source 1..25: mol_type = other RNA
gggcgtgggtggggtagaagaggac

SEQ ID NO: 1422 - RNA, 25 nt, synthetic construct
  misc_feature 1..25: note = Description of Artificial Sequence: Synthetic oligonucleotide
  source 1..25: mol_type = other RNA
ggtgggggcgtgggtggggtagaag

SEQ ID NO: 1423 - RNA, 25 nt, synthetic construct
  misc_feature 1..25: note = Description of Artificial Sequence: Synthetic oligonucleotide
  source 1..25: mol_type = other RNA
tctgattagggtgggggcgtgggtg

SEQ ID NO: 1424 - RNA, 25 nt, synthetic construct
  misc_feature 1..25: note = Description of Artificial Sequence: Synthetic oligonucleotide
  source 1..25: mol_type = other RNA
ctctgattagggtgggggcgtgggt

SEQ ID NO: 1425 - RNA, 25 nt, synthetic construct
  misc_feature 1..25: note = Description of Artificial Sequence: Synthetic oligonucleotide
  source 1..25: mol_type = other RNA
cctctgattagggtgggggcgtggg

SEQ ID NO: 1426 - RNA, 25 nt, synthetic construct
  misc_feature 1..25: note = Description of Artificial Sequence: Synthetic oligonucleotide
  source 1..25: mol_type = other RNA
tggcctctgattagggtgggggcgt

SEQ ID NO: 1427 - RNA, 25 nt, synthetic construct
  misc_feature 1..25: note = Description of Artificial Sequence: Synthetic oligonucleotide
  source 1..25: mol_type = other RNA
ttggcctctgattagggtgggggcg

SEQ ID NO: 1428 - RNA, 25 nt, synthetic construct
  misc_feature 1..25: note = Description of Artificial Sequence: Synthetic oligonucleotide
  source 1..25: mol_type = other RNA
agggtttggcctctgattagggtgg

SEQ ID NO: 1429 - RNA, 25 nt, synthetic construct
  misc_feature 1..25: note = Description of Artificial Sequence: Synthetic oligonucleotide
  source 1..25: mol_type = other RNA
aagggtttggcctctgattagggtg

SEQ ID NO: 1430 - RNA, 25 nt, synthetic construct
  misc_feature 1..25: note = Description of Artificial Sequence: Synthetic oligonucleotide
  source 1..25: mol_type = other RNA
gaagggtttggcctctgattagggt

SEQ ID NO: 1431 - RNA, 25 nt, synthetic construct
  misc_feature 1..25: note = Description of Artificial Sequence: Synthetic oligonucleotide
  source 1..25: mol_type = other RNA
ggaagggtttggcctctgattaggg

SEQ ID NO: 1432 - RNA, 25 nt, synthetic construct
  misc_feature 1..25: note = Description of Artificial Sequence: Synthetic oligonucleotide
  source 1..25: mol_type = other RNA
ccaggaagggtttggcctctgatta

SEQ ID NO: 1433 - RNA, 25 nt, synthetic construct
  misc_feature 1..25: note = Description of Artificial Sequence: Synthetic oligonucleotide
  source 1..25: mol_type = other RNA
tccaggaagggtttggcctctgatt

SEQ ID NO: 1434 - RNA, 25 nt, synthetic construct
  misc_feature 1..25: note = Description of Artificial Sequence: Synthetic oligonucleotide
  source 1..25: mol_type = other RNA
tttatcacaggctccaggaagggtt

SEQ ID NO: 1435 - RNA, 25 nt, synthetic construct
  misc_feature 1..25: note = Description of Artificial Sequence: Synthetic oligonucleotide
  source 1..25: mol_type = other RNA
ttgcttttatcacaggctccaggaa

SEQ ID NO: 1436 - RNA, 25 nt, synthetic construct
  misc_feature 1..25: note = Description of Artificial Sequence: Synthetic oligonucleotide
  source 1..25: mol_type = other RNA
gttgcttttatcacaggctccagga

SEQ ID NO: 1437 - RNA, 25 nt, synthetic construct
  misc_feature 1..25: note = Description of Artificial Sequence: Synthetic oligonucleotide
  source 1..25: mol_type = other RNA
aacagttgcttttatcacaggctcc

SEQ ID NO: 1438 - RNA, 25 nt, synthetic construct
  misc_feature 1..25: note = Description of Artificial Sequence: Synthetic oligonucleotide
  source 1..25: mol_type = other RNA
gcaagctaacagttgcttttatcac

SEQ ID NO: 1439 - RNA, 25 nt, synthetic construct
  misc_feature 1..25: note = Description of Artificial Sequence: Synthetic oligonucleotide
  source 1..25: mol_type = other RNA
atctactcttagacataacacacca

SEQ ID NO: 1440 - RNA, 25 nt, synthetic construct
  misc_feature 1..25: note = Description of Artificial Sequence: Synthetic oligonucleotide
  source 1..25: mol_type = other RNA
catctactcttagacataacacacc

SEQ ID NO: 1441 - RNA, 25 nt, synthetic construct
  misc_feature 1..25: note = Description of Artificial Sequence: Synthetic oligonucleotide
  source 1..25: mol_type = other RNA
aataacataggccagaaaagagata

SEQ ID NO: 1442 - RNA, 25 nt, synthetic construct
  misc_feature 1..25: note = Description of Artificial Sequence: Synthetic oligonucleotide
  source 1..25: mol_type = other RNA
gcaaagtccatacaggtaataacat

SEQ ID NO: 1443 - RNA, 25 nt, synthetic construct
  misc_feature 1..25: note = Description of Artificial Sequence: Synthetic oligonucleotide
  source 1..25: mol_type = other RNA
gctgattccagtgcaaagtccatac

SEQ ID NO: 1444 - RNA, 25 nt, synthetic construct
  misc_feature 1..25: note = Description of Artificial Sequence: Synthetic oligonucleotide
  source 1..25: mol_type = other RNA
cgatacagggctggctctatgcccc

SEQ ID NO: 1445 - RNA, 25 nt, synthetic construct
  misc_feature 1..25: note = Description of Artificial Sequence: Synthetic oligonucleotide
  source 1..25: mol_type = other RNA
agatggctgaaaagcgatacagggc

SEQ ID NO: 1446 - RNA, 25 nt, synthetic construct
  misc_feature 1..25: note = Description of Artificial Sequence: Synthetic oligonucleotide
  source 1..25: mol_type = other RNA
agtgagatggctgaaaagcgataca

SEQ ID NO: 1447 - RNA, 25 nt, synthetic construct
  misc_feature 1..25: note = Description of Artificial Sequence: Synthetic oligonucleotide
  source 1..25: mol_type = other RNA
tagtgagatggctgaaaagcgatac

SEQ ID NO: 1448 - RNA, 25 nt, synthetic construct
  misc_feature 1..25: note = Description of Artificial Sequence: Synthetic oligonucleotide
  source 1..25: mol_type = other RNA
gacttgggagttatctgtagtgaga

SEQ ID NO: 1449 - RNA, 25 nt, synthetic construct
  misc_feature 1..25: note = Description of Artificial Sequence: Synthetic oligonucleotide
  source 1..25: mol_type = other RNA
taaggaaggcagctagacaggactt

SEQ ID NO: 1450 - RNA, 25 nt, synthetic construct
  misc_feature 1..25: note = Description of Artificial Sequence: Synthetic oligonucleotide
  source 1..25: mol_type = other RNA
ataaggaaggcagctagacaggact

SEQ ID NO: 1451 - RNA, 25 nt, synthetic construct
  misc_feature 1..25: note = Description of Artificial Sequence: Synthetic oligonucleotide
  source 1..25: mol_type = other RNA
cctgtgataaggaaggcagctagac

SEQ ID NO: 1452 - RNA, 25 nt, synthetic construct
  misc_feature 1..25: note = Description of Artificial Sequence: Synthetic oligonucleotide
  source 1..25: mol_type = other RNA
ttgggtgctattcctgtgataagga

SEQ ID NO: 1453 - RNA, 25 nt, synthetic construct
  misc_feature 1..25: note = Description of Artificial Sequence: Synthetic oligonucleotide
  source 1..25: mol_type = other RNA
gaccttgggtgctattcctgtgata

SEQ ID NO: 1454 - RNA, 25 nt, synthetic construct
  misc_feature 1..25: note = Description of Artificial Sequence: Synthetic oligonucleotide
  source 1..25: mol_type = other RNA
ctactctgaggtactgatggacctt

SEQ ID NO: 1455 - RNA, 25 nt, synthetic construct
  misc_feature 1..25: note = Description of Artificial Sequence: Synthetic oligonucleotide
  source 1..25: mol_type = other RNA
tctactctgaggtactgatggacct

SEQ ID NO: 1456 - RNA, 25 nt, synthetic construct
  misc_feature 1..25: note = Description of Artificial Sequence: Synthetic oligonucleotide
  source 1..25: mol_type = other RNA
agggggttctactctgaggtactga

SEQ ID NO: 1457 - RNA, 25 nt, synthetic construct
  misc_feature 1..25: note = Description of Artificial Sequence: Synthetic oligonucleotide
  source 1..25: mol_type = other RNA
ctagtttatagggggttctactctg

SEQ ID NO: 1458 - RNA, 25 nt, synthetic construct
  misc_feature 1..25: note = Description of Artificial Sequence: Synthetic oligonucleotide
  source 1..25: mol_type = other RNA
tgggcaaaccagactagtttatagg

SEQ ID NO: 1459 - RNA, 25 nt, synthetic construct
  misc_feature 1..25: note = Description of Artificial Sequence: Synthetic oligonucleotide
  source 1..25: mol_type = other RNA
atgggcaaaccagactagtttatag

SEQ ID NO: 1460 - RNA, 25 nt, synthetic construct
  misc_feature 1..25: note = Description of Artificial Sequence: Synthetic oligonucleotide
  source 1..25: mol_type = other RNA
catgggcaaaccagactagtttata

SEQ ID NO: 1461 - RNA, 25 nt, synthetic construct
  misc_feature 1..25: note = Description of Artificial Sequence: Synthetic oligonucleotide
  source 1..25: mol_type = other RNA
ccatgggcaaaccagactagtttat

SEQ ID NO: 1462 - RNA, 25 nt, synthetic construct
  misc_feature 1..25: note = Description of Artificial Sequence: Synthetic oligonucleotide
  source 1..25: mol_type = other RNA
ggaaaacagcctgactgtgccccat

SEQ ID NO: 1463 - RNA, 25 nt, synthetic construct
  misc_feature 1..25: note = Description of Artificial Sequence: Synthetic oligonucleotide
  source 1..25: mol_type = other RNA
tggaaaacagcctgactgtgcccca

SEQ ID NO: 1464 - RNA, 25 nt, synthetic construct
  misc_feature 1..25: note = Description of Artificial Sequence: Synthetic oligonucleotide
  source 1..25: mol_type = other RNA
ggcagagaatgtctgcaccccaccc

SEQ ID NO: 1465 - RNA, 25 nt, synthetic construct
  misc_feature 1..25: note = Description of Artificial Sequence: Synthetic oligonucleotide
  source 1..25: mol_type = other RNA
tgacgttatatgtaagcatcacaac

SEQ ID NO: 1466 - RNA, 25 nt, synthetic construct
  misc_feature 1..25: note = Description of Artificial Sequence: Synthetic oligonucleotide
  source 1..25: mol_type = other RNA
ggaagctccaaactctcaaaccaca

SEQ ID NO: 1467 - RNA, 25 nt, synthetic construct
  misc_feature 1..25: note = Description of Artificial Sequence: Synthetic oligonucleotide
  source 1..25: mol_type = other RNA
gggaagctccaaactctcaaaccac

SEQ ID NO: 1468 - RNA, 25 nt, synthetic construct
  misc_feature 1..25: note = Description of Artificial Sequence: Synthetic oligonucleotide
  source 1..25: mol_type = other RNA
cccattgagaatattttgactttta

SEQ ID NO: 1469 - RNA, 25 nt, synthetic construct
  misc_feature 1..25: note = Description of Artificial Sequence: Synthetic oligonucleotide
  source 1..25: mol_type = other RNA
gcccattgagaatattttgactttt

SEQ ID NO: 1470 - RNA, 25 nt, synthetic construct
  misc_feature 1..25: note = Description of Artificial Sequence: Synthetic oligonucleotide
  source 1..25: mol_type = other RNA
ccttttgtgtgtatgtgctgattga

SEQ ID NO: 1471 - RNA, 25 nt, synthetic construct
  misc_feature 1..25: note = Description of Artificial Sequence: Synthetic oligonucleotide
  source 1..25: mol_type = other RNA
accttttgtgtgtatgtgctgattg

SEQ ID NO: 1472 - RNA, 25 nt, synthetic construct
  misc_feature 1..25: note = Description of Artificial Sequence: Synthetic oligonucleotide
  source 1..25: mol_type = other RNA
agcaggaaaagaattacagttttcc

SEQ ID NO: 1473 - RNA, 25 nt, synthetic construct
  misc_feature 1..25: note = Description of Artificial Sequence: Synthetic oligonucleotide
  source 1..25: mol_type = other RNA
ggtattgaattgcctgtctttgagc

SEQ ID NO: 1474 - RNA, 25 nt, synthetic construct
  misc_feature 1..25: note = Description of Artificial Sequence: Synthetic oligonucleotide
  source 1..25: mol_type = other RNA
ggcaagggtttttggttgggggaag

SEQ ID NO: 1475 - RNA, 25 nt, synthetic construct
  misc_feature 1..25: note = Description of Artificial Sequence: Synthetic oligonucleotide
  source 1..25: mol_type = other RNA
tggcaagggtttttggttgggggaa

SEQ ID NO: 1476 - RNA, 25 nt, synthetic construct
  misc_feature 1..25: note = Description of Artificial Sequence: Synthetic oligonucleotide
  source 1..25: mol_type = other RNA
gtggcaagggtttttggttggggga

SEQ ID NO: 1477 - RNA, 25 nt, synthetic construct
  misc_feature 1..25: note = Description of Artificial Sequence: Synthetic oligonucleotide
  source 1..25: mol_type = other RNA
catggtggcaagggtttttggttgg

SEQ ID NO: 1478 - RNA, 25 nt, synthetic construct
  misc_feature 1..25: note = Description of Artificial Sequence: Synthetic oligonucleotide
  source 1..25: mol_type = other RNA
ccatggtggcaagggtttttggttg

SEQ ID NO: 1479 - RNA, 25 nt, synthetic construct
  misc_feature 1..25: note = Description of Artificial Sequence: Synthetic oligonucleotide
  source 1..25: mol_type = other RNA
cccatggtggcaagggtttttggtt

SEQ ID NO: 1480 - RNA, 25 nt, synthetic construct
  misc_feature 1..25: note = Description of Artificial Sequence: Synthetic oligonucleotide
  source 1..25: mol_type = other RNA
tcccatggtggcaagggtttttggt

SEQ ID NO: 1481 - RNA, 25 nt, synthetic construct
  misc_feature 1..25: note = Description of Artificial Sequence: Synthetic oligonucleotide
  source 1..25: mol_type = other RNA
aggctcccatggtggcaagggtttt

SEQ ID NO: 1482 - RNA, 25 nt, synthetic construct
  misc_feature 1..25: note = Description of Artificial Sequence: Synthetic oligonucleotide
  source 1..25: mol_type = other RNA
ctgccccaggctcccatggtggcaa

SEQ ID NO: 1483 - RNA, 25 nt, synthetic construct
  misc_feature 1..25: note = Description of Artificial Sequence: Synthetic oligonucleotide
  source 1..25: mol_type = other RNA
tctgccccaggctcccatggtggca

SEQ ID NO: 1484 - RNA, 25 nt, synthetic construct
  misc_feature 1..25: note = Description of Artificial Sequence: Synthetic oligonucleotide
  source 1..25: mol_type = other RNA
ccttctctgccccaggctcccatgg

SEQ ID NO: 1485 - RNA, 25 nt, synthetic construct
  misc_feature 1..25: note = Description of Artificial Sequence: Synthetic oligonucleotide
  source 1..25: mol_type = other RNA
gtgccttctctgccccaggctccca

SEQ ID NO: 1486 - RNA, 25 nt, synthetic construct
  misc_feature 1..25: note = Description of Artificial Sequence: Synthetic oligonucleotide
  source 1..25: mol_type = other RNA
gacttcactgtgccttctctgcccc

SEQ ID NO: 1487 - RNA, 25 nt, synthetic construct
  misc_feature 1..25: note = Description of Artificial Sequence: Synthetic oligonucleotide
  source 1..25: mol_type = other RNA
aaaaatgacagcaccatttagagcc

SEQ ID NO: 1488 - RNA, 25 nt, synthetic construct
  misc_feature 1..25: note = Description of Artificial Sequence: Synthetic oligonucleotide
  source 1..25: mol_type = other RNA
tttccagagctgcagtatgtttctt

SEQ ID NO: 1489 - RNA, 25 nt, synthetic construct
  misc_feature 1..25: note = Description of Artificial Sequence: Synthetic oligonucleotide
  source 1..25: mol_type = other RNA
gggtgacctctggatcccttctctt

SEQ ID NO: 1490 - RNA, 25 nt, synthetic construct
  misc_feature 1..25: note = Description of Artificial Sequence: Synthetic oligonucleotide
  source 1..25: mol_type = other RNA
acttttcacatatgagggtgacctc

SEQ ID NO: 1491 - RNA, 25 nt, synthetic construct
  misc_feature 1..25: note = Description of Artificial Sequence: Synthetic oligonucleotide
  source 1..25: mol_type = other RNA
ttatcaattgacttttcacatatga

SEQ ID NO: 1492 - RNA, 25 nt, synthetic construct
  misc_feature 1..25: note = Description of Artificial Sequence: Synthetic oligonucleotide
  source 1..25: mol_type = other RNA
attatcaattgacttttcacatatg

SEQ ID NO: 1493 - RNA, 25 nt, synthetic construct
  misc_feature 1..25: note = Description of Artificial Sequence: Synthetic oligonucleotide
  source 1..25: mol_type = other RNA
gcattgctttcaatcatctcccctc

SEQ ID NO: 1494 - RNA, 25 nt, synthetic construct
  misc_feature 1..25: note = Description of Artificial Sequence: Synthetic oligonucleotide
  source 1..25: mol_type = other RNA
tgtttccgtaatccatttcctgcac

SEQ ID NO: 1495 - RNA, 25 nt, synthetic construct
  misc_feature 1..25: note = Description of Artificial Sequence: Synthetic oligonucleotide
  source 1..25: mol_type = other RNA
agaactttcccggttctggttttct

SEQ ID NO: 1496 - RNA, 25 nt, synthetic construct
  misc_feature 1..25: note = Description of Artificial Sequence: Synthetic oligonucleotide
  source 1..25: mol_type = other RNA
cagaactttcccggttctggttttc

SEQ ID NO: 1497 - RNA, 25 nt, synthetic construct
  misc_feature 1..25: note = Description of Artificial Sequence: Synthetic oligonucleotide
  source 1..25: mol_type = other RNA
ccgacttccagaactttcccggttc

SEQ ID NO: 1498 - RNA, 25 nt, synthetic construct
  misc_feature 1..25: note = Description of Artificial Sequence: Synthetic oligonucleotide
  source 1..25: mol_type = other RNA
gtttttccgacttccagaactttcc

SEQ ID NO: 1499 - RNA, 25 nt, synthetic construct
  misc_feature 1..25: note = Description of Artificial Sequence: Synthetic oligonucleotide
  source 1..25: mol_type = other RNA
gacaaggcattctgtaaacgtgtat

SEQ ID NO: 1500 - RNA, 20 nt, synthetic construct
  misc_feature 1..20: note = Description of Artificial Sequence: Synthetic oligonucleotide
  source 1..20: mol_type = other RNA
tatcaagcatccagcatttg

SEQ ID NO: 1501 - RNA, 20 nt, synthetic construct
  misc_feature 1..20: note = Description of Artificial Sequence: Synthetic oligonucleotide
  source 1..20: mol_type = other RNA
tatctaaaaatgtaattgct

SEQ ID NO: 1502 - RNA, 20 nt, synthetic construct
  misc_feature 1..20: note = Description of Artificial Sequence: Synthetic oligonucleotide
  source 1..20: mol_type = other RNA
agcatttctatacatgtctt

SEQ ID NO: 1503 - RNA, 20 nt, synthetic construct
  misc_feature 1..20: note = Description of Artificial Sequence: Synthetic oligonucleotide
  source 1..20: mol_type = other RNA
taatcataaaaacctcaaac

SEQ ID NO: 1504 - RNA, 20 nt, synthetic construct
  misc_feature 1..20: note = Description of Artificial Sequence: Synthetic oligonucleotide
  source 1..20: mol_type = other RNA
tttaagtggctaccggtttg

SEQ ID NO: 1505 - RNA, 20 nt, synthetic construct
  misc_feature 1..20: note = Description of Artificial Sequence: Synthetic oligonucleotide
  source 1..20: mol_type = other RNA
gtaagcatttaagtggctac

SEQ ID NO: 1506 - RNA, 20 nt, synthetic construct
  misc_feature 1..20: note = Description of Artificial Sequence: Synthetic oligonucleotide
  source 1..20: mol_type = other RNA
actgttggtaagcatttaag

SEQ ID NO: 1507 - RNA, 20 nt, synthetic construct
  misc_feature 1..20: note = Description of Artificial Sequence: Synthetic oligonucleotide
  source 1..20: mol_type = other RNA
taatttatcaattctactgt

SEQ ID NO: 1508 - RNA, 20 nt, synthetic construct
  misc_feature 1..20: note = Description of Artificial Sequence: Synthetic oligonucleotide
  source 1..20: mol_type = other RNA
acagtagaattgataaatta

SEQ ID NO: 1509 - RNA, 20 nt, synthetic construct
  misc_feature 1..20: note = Description of Artificial Sequence: Synthetic oligonucleotide
  source 1..20: mol_type = other RNA
caaatgcattttacagcatt

SEQ ID NO: 1510 - RNA, 20 nt, synthetic construct
  misc_feature 1..20: note = Description of Artificial Sequence: Synthetic oligonucleotide
  source 1..20: mol_type = other RNA
ggttgattaaaagtaaccag

SEQ ID NO: 1511 - RNA, 20 nt, synthetic construct
  misc_feature 1..20: note = Description of Artificial Sequence: Synthetic oligonucleotide
  source 1..20: mol_type = other RNA
atatagtttgaactcacctc

SEQ ID NO: 1512 - RNA, 20 nt, synthetic construct
  misc_feature 1..20: note = Description of Artificial Sequence: Synthetic oligonucleotide
  source 1..20: mol_type = other RNA
tttatttgtatatagaaaga

SEQ ID NO: 1513 - RNA, 20 nt, synthetic construct
  misc_feature 1..20: note = Description of Artificial Sequence: Synthetic oligonucleotide
  source 1..20: mol_type = other RNA
tgcctgagattctgatcaca

SEQ ID NO: 1514 - RNA, 20 nt, synthetic construct
  misc_feature 1..20: note = Description of Artificial Sequence: Synthetic oligonucleotide
  source 1..20: mol_type = other RNA
gcctgagattctgatcacaa

SEQ ID NO: 1515 - RNA, 20 nt, synthetic construct
  misc_feature 1..20: note = Description of Artificial Sequence: Synthetic oligonucleotide
  source 1..20: mol_type = other RNA
cctgagattctgatcacaag

SEQ ID NO: 1516 - RNA, 20 nt, synthetic construct
  misc_feature 1..20: note = Description of Artificial Sequence: Synthetic oligonucleotide
  source 1..20: mol_type = other RNA
ccccttgtgatcagaatctc

SEQ ID NO: 1517 - RNA, 20 nt, synthetic construct
  misc_feature 1..20: note = Description of Artificial Sequence: Synthetic oligonucleotide
  source 1..20: mol_type = other RNA
aaggggaaatgttataaaat

SEQ ID NO: 1518 - RNA, 20 nt, synthetic construct
  misc_feature 1..20: note = Description of Artificial Sequence: Synthetic oligonucleotide
  source 1..20: mol_type = other RNA
aggggaaatgttataaaata

SEQ ID NO: 1519 - RNA, 20 nt, synthetic construct
  misc_feature 1..20: note = Description of Artificial Sequence: Synthetic oligonucleotide
  source 1..20: mol_type = other RNA
tgttataaaatagggtagag

SEQ ID NO: 1520 - RNA, 20 nt, synthetic construct
  misc_feature 1..20: note = Description of Artificial Sequence: Synthetic oligonucleotide
  source 1..20: mol_type = other RNA
caaagtttaaaggtcattca

SEQ ID NO: 1521 - RNA, 20 nt, synthetic construct
  misc_feature 1..20: note = Description of Artificial Sequence: Synthetic oligonucleotide
  source 1..20: mol_type = other RNA
taacttgtaacaaagtttaa

SEQ ID NO: 1522 - RNA, 20 nt, synthetic construct
  misc_feature 1..20: note = Description of Artificial Sequence: Synthetic oligonucleotide
  source 1..20: mol_type = other RNA
caagttatttttctgtaacc

SEQ ID NO: 1523 - RNA, 20 nt, synthetic construct
  misc_feature 1..20: note = Description of Artificial Sequence: Synthetic oligonucleotide
  source 1..20: mol_type = other RNA
aatatctttcgttggcttcc

SEQ ID NO: 1524 - RNA, 20 nt, synthetic construct
  misc_feature 1..20: note = Description of Artificial Sequence: Synthetic oligonucleotide
  source 1..20: mol_type = other RNA
aattattcaatatctttcgt

SEQ ID NO: 1525 - RNA, 20 nt, synthetic construct
  misc_feature 1..20: note = Description of Artificial Sequence: Synthetic oligonucleotide
  source 1..20: mol_type = other RNA
gatattgaataattcaagaa

SEQ ID NO: 1526 - RNA, 20 nt, synthetic construct
  misc_feature 1..20: note = Description of Artificial Sequence: Synthetic oligonucleotide
  source 1..20: mol_type = other RNA
attgaataattcaagaaagg

SEQ ID NO: 1527 - RNA, 20 nt, synthetic construct
  misc_feature 1..20: note = Description of Artificial Sequence: Synthetic oligonucleotide
  source 1..20: mol_type = other RNA
gaataattcaagaaaggtgg

SEQ ID NO: 1528 - RNA, 20 nt, synthetic construct
  misc_feature 1..20: note = Description of Artificial Sequence: Synthetic oligonucleotide
  source 1..20: mol_type = other RNA
attcaagaaaggtggtggca

SEQ ID NO: 1529 - RNA, 20 nt, synthetic construct
  misc_feature 1..20: note = Description of Artificial Sequence: Synthetic oligonucleotide
  source 1..20: mol_type = other RNA
tattttagaagtagagaaaa

SEQ ID NO: 1530 - RNA, 20 nt, synthetic construct
  misc_feature 1..20: note = Description of Artificial Sequence: Synthetic oligonucleotide
  source 1..20: mol_type = other RNA
attttagaagtagagaaaat

SEQ ID NO: 1531 - RNA, 20 nt, synthetic construct
  misc_feature 1..20: note = Description of Artificial Sequence: Synthetic oligonucleotide
  source 1..20: mol_type = other RNA
gaaaatgggagacaaatagc

SEQ ID NO: 1532 - RNA, 20 nt, synthetic construct
  misc_feature 1..20: note = Description of Artificial Sequence: Synthetic oligonucleotide
  source 1..20: mol_type = other RNA
aaaatgggagacaaatagct

SEQ ID NO: 1533 - RNA, 20 nt, synthetic construct
  misc_feature 1..20: note = Description of Artificial Sequence: Synthetic oligonucleotide
  source 1..20: mol_type = other RNA
agctgggcttctgttgcagt

SEQ ID NO: 1534 - RNA, 20 nt, synthetic construct
  misc_feature 1..20: note = Description of Artificial Sequence: Synthetic oligonucleotide
  source 1..20: mol_type = other RNA
gctgggcttctgttgcagta

SEQ ID NO: 1535 - RNA, 20 nt, synthetic construct
  misc_feature 1..20: note = Description of Artificial Sequence: Synthetic oligonucleotide
  source 1..20: mol_type = other RNA
gccatttctattatcagact

SEQ ID NO: 1536 - RNA, 20 nt, synthetic construct
  misc_feature 1..20: note = Description of Artificial Sequence: Synthetic oligonucleotide
  source 1..20: mol_type = other RNA
tccaagtctgataatagaaa

SEQ ID NO: 1537 - RNA, 20 nt, synthetic construct
  misc_feature 1..20: note = Description of Artificial Sequence: Synthetic oligonucleotide
  source 1..20: mol_type = other RNA
ttatcagacttggaccatga

SEQ ID NO: 1538 - RNA, 20 nt, synthetic construct
  misc_feature 1..20: note = Description of Artificial Sequence: Synthetic oligonucleotide
  source 1..20: mol_type = other RNA
cacgactgacatcaccgtca

SEQ ID NO: 1539 - RNA, 20 nt, synthetic construct
  misc_feature 1..20: note = Description of Artificial Sequence: Synthetic oligonucleotide
  source 1..20: mol_type = other RNA
tcagtcgtgaacacaagaat

SEQ ID NO: 1540 - RNA, 20 nt, synthetic construct
  misc_feature 1..20: note = Description of Artificial Sequence: Synthetic oligonucleotide
  source 1..20: mol_type = other RNA
cagtcgtgaacacaagaata

SEQ ID NO: 1541 - RNA, 20 nt, synthetic construct
  misc_feature 1..20: note = Description of Artificial Sequence: Synthetic oligonucleotide
  source 1..20: mol_type = other RNA
ggccacatttgtgagtttag

SEQ ID NO: 1542 - RNA, 20 nt, synthetic construct
  misc_feature 1..20: note = Description of Artificial Sequence: Synthetic oligonucleotide
  source 1..20: mol_type = other RNA
taccactaaactcacaaatg

SEQ ID NO: 1543 - RNA, 20 nt, synthetic construct
  misc_feature 1..20: note = Description of Artificial Sequence: Synthetic oligonucleotide
  source 1..20: mol_type = other RNA
taaaatcagaaatacagtct

SEQ ID NO: 1544 - RNA, 20 nt, synthetic construct
  misc_feature 1..20: note = Description of Artificial Sequence: Synthetic oligonucleotide
  source 1..20: mol_type = other RNA
aaaagatgtacttagatatg

SEQ ID NO: 1545 - RNA, 20 nt, synthetic construct
  misc_feature 1..20: note = Description of Artificial Sequence: Synthetic oligonucleotide
  source 1..20: mol_type = other RNA
tgtacttagatatgtggatc

SEQ ID NO: 1546 - RNA, 20 nt, synthetic construct
  misc_feature 1..20: note = Description of Artificial Sequence: Synthetic oligonucleotide
  source 1..20: mol_type = other RNA
agctcagaaagaatacaacc

SEQ ID NO: 1547 - RNA, 20 nt, synthetic construct
  misc_feature 1..20: note = Description of Artificial Sequence: Synthetic oligonucleotide
  source 1..20: mol_type = other RNA
accaggtcaagaatacagaa

SEQ ID NO: 1548 - RNA, 20 nt, synthetic construct
  misc_feature 1..20: note = Description of Artificial Sequence: Synthetic oligonucleotide
  source 1..20: mol_type = other RNA
tccattctgtattcttgacc

SEQ ID NO: 1549 - RNA, 20 nt, synthetic construct
  misc_feature 1..20: note = Description of Artificial Sequence: Synthetic oligonucleotide
  source 1..20: mol_type = other RNA
ctgtcatttttaacaggtag

SEQ ID NO: 1550 - RNA, 20 nt, synthetic construct
  misc_feature 1..20: note = Description of Artificial Sequence: Synthetic oligonucleotide
  source 1..20: mol_type = other RNA
catcatctgtcatttttaac

SEQ ID NO: 1551 - RNA, 20 nt, synthetic construct
  misc_feature 1..20: note = Description of Artificial Sequence: Synthetic oligonucleotide
  source 1..20: mol_type = other RNA
aaacacattctaagatttta

SEQ ID NO: 1552 - RNA, 20 nt, synthetic construct
  misc_feature 1..20: note = Description of Artificial Sequence: Synthetic oligonucleotide
  source 1..20: mol_type = other RNA
aatcttagaatgtgtttgtg

SEQ ID NO: 1553 - RNA, 20 nt, synthetic construct
  misc_feature 1..20: note = Description of Artificial Sequence: Synthetic oligonucleotide
  source 1..20: mol_type = other RNA
atcttagaatgtgtttgtga

SEQ ID NO: 1554 - RNA, 20 nt, synthetic construct
  misc_feature 1..20: note = Description of Artificial Sequence: Synthetic oligonucleotide
  source 1..20: mol_type = other RNA
ttagaatgtgtttgtgaggg

SEQ ID NO: 1555 - RNA, 20 nt, synthetic construct
  misc_feature 1..20: note = Description of Artificial Sequence: Synthetic oligonucleotide
  source 1..20: mol_type = other RNA
caattttcttatatatgaat

SEQ ID NO: 1556 - RNA, 20 nt, synthetic construct
  misc_feature 1..20: note = Description of Artificial Sequence: Synthetic oligonucleotide
  source 1..20: mol_type = other RNA
ttgattctaaaaaaaatgtt

SEQ ID NO: 1557 - RNA, 20 nt, synthetic construct
  misc_feature 1..20: note = Description of Artificial Sequence: Synthetic oligonucleotide
  source 1..20: mol_type = other RNA
aaatgttaggtaaattctta

SEQ ID NO: 1558 - RNA, 20 nt, synthetic construct
  misc_feature 1..20: note = Description of Artificial Sequence: Synthetic oligonucleotide
  source 1..20: mol_type = other RNA
ggtaaattcttaaggccatg

SEQ ID NO: 1559 - RNA, 20 nt, synthetic construct
  misc_feature 1..20: note = Description of Artificial Sequence: Synthetic oligonucleotide
  source 1..20: mol_type = other RNA
agatcaaataacagtcctca

SEQ ID NO: 1560 - RNA, 20 nt, synthetic construct
  misc_feature 1..20: note = Description of Artificial Sequence: Synthetic oligonucleotide
  source 1..20: mol_type = other RNA
gtctgttaattccaaagact

SEQ ID NO: 1561 - RNA, 20 nt, synthetic construct
  misc_feature 1..20: note = Description of Artificial Sequence: Synthetic oligonucleotide
  source 1..20: mol_type = other RNA
aaagtgaaaagccaagtctt

SEQ ID NO: 1562 - RNA, 20 nt, synthetic construct
  misc_feature 1..20: note = Description of Artificial Sequence: Synthetic oligonucleotide
  source 1..20: mol_type = other RNA
cctgaaatgattttacacat

SEQ ID NO: 1563 - RNA, 20 nt, synthetic construct
  misc_feature 1..20: note = Description of Artificial Sequence: Synthetic oligonucleotide
  source 1..20: mol_type = other RNA
ccaatgtgtaaaatcatttc

SEQ ID NO: 1564 - RNA, 20 nt, synthetic construct
  misc_feature 1..20: note = Description of Artificial Sequence: Synthetic oligonucleotide
  source 1..20: mol_type = other RNA
ctgaaatgattttacacatt

SEQ ID NO: 1565 - RNA, 20 nt, synthetic construct
  misc_feature 1..20: note = Description of Artificial Sequence: Synthetic oligonucleotide
  source 1..20: mol_type = other RNA
attttacacattgggagatc

SEQ ID NO: 1566 - RNA, 20 nt, synthetic construct
  misc_feature 1..20: note = Description of Artificial Sequence: Synthetic oligonucleotide
  source 1..20: mol_type = other RNA
ggttacatgtttattctata

SEQ ID NO: 1567 - RNA, 20 nt, synthetic construct
  misc_feature 1..20: note = Description of Artificial Sequence: Synthetic oligonucleotide
  source 1..20: mol_type = other RNA
tctatatggattgcattgag

SEQ ID NO: 1568 - RNA, 20 nt, synthetic construct
  misc_feature 1..20: note = Description of Artificial Sequence: Synthetic oligonucleotide
  source 1..20: mol_type = other RNA
aggatttgtataacagaata

SEQ ID NO: 1569 - RNA, 20 nt, synthetic construct
  misc_feature 1..20: note = Description of Artificial Sequence: Synthetic oligonucleotide
  source 1..20: mol_type = other RNA
ttttcttttctcttctgaga

SEQ ID NO: 1570 - RNA, 20 nt, synthetic construct
  misc_feature 1..20: note = Description of Artificial Sequence: Synthetic oligonucleotide
  source 1..20: mol_type = other RNA
gcactctagcttgggcaata

SEQ ID NO: 1571 - RNA, 20 nt, synthetic construct
  misc_feature 1..20: note = Description of Artificial Sequence: Synthetic oligonucleotide
  source 1..20: mol_type = other RNA
tgcactctagcttgggcaat

SEQ ID NO: 1572 - RNA, 20 nt, synthetic construct
  misc_feature 1..20: note = Description of Artificial Sequence: Synthetic oligonucleotide
  source 1..20: mol_type = other RNA
tgcaccattgcactctagct

SEQ ID NO: 1573 - RNA, 20 nt, synthetic construct
  misc_feature 1..20: note = Description of Artificial Sequence: Synthetic oligonucleotide
  source 1..20: mol_type = other RNA
gctattcaggtggctgaggc

SEQ ID NO: 1574 - RNA, 20 nt, synthetic construct
  misc_feature 1..20: note = Description of Artificial Sequence: Synthetic oligonucleotide
  source 1..20: mol_type = other RNA
acctgaatagctgggactgc

SEQ ID NO: 1575 - RNA, 20 nt, synthetic construct
  misc_feature 1..20: note = Description of Artificial Sequence: Synthetic oligonucleotide
  source 1..20: mol_type = other RNA
gcaggcatgcaccacacgcc

SEQ ID NO: 1576 - RNA, 20 nt, synthetic construct
  misc_feature 1..20: note = Description of Artificial Sequence: Synthetic oligonucleotide
  source 1..20: mol_type = other RNA
tacaaaatcagccgggcgtg

SEQ ID NO: 1577 - RNA, 20 nt, synthetic construct
  misc_feature 1..20: note = Description of Artificial Sequence: Synthetic oligonucleotide
  source 1..20: mol_type = other RNA
ggcttgtaaacccagcactt

SEQ ID NO: 1578 - RNA, 20 nt, synthetic construct
  misc_feature 1..20: note = Description of Artificial Sequence: Synthetic oligonucleotide
  source 1..20: mol_type = other RNA
ctggctggatgcggtggctc

SEQ ID NO: 1579 - RNA, 20 nt, synthetic construct
  misc_feature 1..20: note = Description of Artificial Sequence: Synthetic oligonucleotide
  source 1..20: mol_type = other RNA
ctgagccaccgcatccagcc

SEQ ID NO: 1580 - RNA, 20 nt, synthetic construct
  misc_feature 1..20: note = Description of Artificial Sequence: Synthetic oligonucleotide
  source 1..20: mol_type = other RNA
cttatcctggctggatgcgg

SEQ ID NO: 1581 - RNA, 20 nt, synthetic construct
  misc_feature 1..20: note = Description of Artificial Sequence: Synthetic oligonucleotide
  source 1..20: mol_type = other RNA
caccgcatccagccaggata

SEQ ID NO: 1582 - RNA, 20 nt, synthetic construct
  misc_feature 1..20: note = Description of Artificial Sequence: Synthetic oligonucleotide
  source 1..20: mol_type = other RNA
gaccttatcctggctggatg

SEQ ID NO: 1583 - RNA, 20 nt, synthetic construct
  misc_feature 1..20: note = Description of Artificial Sequence: Synthetic oligonucleotide
  source 1..20: mol_type = other RNA
cttttagaccttatcctggc

SEQ ID NO: 1584 - RNA, 20 nt, synthetic construct
  misc_feature 1..20: note = Description of Artificial Sequence: Synthetic oligonucleotide
  source 1..20: mol_type = other RNA
gccaggataaggtctaaaag

SEQ ID NO: 1585 - RNA, 20 nt, synthetic construct
  misc_feature 1..20: note = Description of Artificial Sequence: Synthetic oligonucleotide
  source 1..20: mol_type = other RNA
tccacttttagaccttatcc

SEQ ID NO: 1586 - RNA, 20 nt, synthetic construct
  misc_feature 1..20: note = Description of Artificial Sequence: Synthetic oligonucleotide
  source 1..20: mol_type = other RNA
aatagcatctactcttgttc

SEQ ID NO: 1587 - RNA, 20 nt, synthetic construct
  misc_feature 1..20: note = Description of Artificial Sequence: Synthetic oligonucleotide
  source 1..20: mol_type = other RNA
ctcttgttcaggaaacaatg

SEQ ID NO: 1588 - RNA, 20 nt, synthetic construct
  misc_feature 1..20: note = Description of Artificial Sequence: Synthetic oligonucleotide
  source 1..20: mol_type = other RNA
ggaaacaatgaggacctgac

SEQ ID NO: 1589 - RNA, 20 nt, synthetic construct
  misc_feature 1..20: note = Description of Artificial Sequence: Synthetic oligonucleotide
  source 1..20: mol_type = other RNA
gaaacaatgaggacctgact

SEQ ID NO: 1590 - RNA, 20 nt, synthetic construct
  misc_feature 1..20: note = Description of Artificial Sequence: Synthetic oligonucleotide
  source 1..20: mol_type = other RNA
acctgactgggcagtaagag

SEQ ID NO: 1591 - RNA, 20 nt, synthetic construct
  misc_feature 1..20: note = Description of Artificial Sequence: Synthetic oligonucleotide
  source 1..20: mol_type = other RNA
accactcttactgcccagtc

SEQ ID NO: 1592 - RNA, 20 nt, synthetic construct
  misc_feature 1..20: note = Description of Artificial Sequence: Synthetic oligonucleotide
  source 1..20: mol_type = other RNA
aagagtggtgattaatagat

SEQ ID NO: 1593 - RNA, 20 nt, synthetic construct
  misc_feature 1..20: note = Description of Artificial Sequence: Synthetic oligonucleotide
  source 1..20: mol_type = other RNA
agagtggtgattaatagata

SEQ ID NO: 1594 - RNA, 20 nt, synthetic construct
  misc_feature 1..20: note = Description of Artificial Sequence: Synthetic oligonucleotide
  source 1..20: mol_type = other RNA
agaatcgaactgttgattag

SEQ ID NO: 1595 - RNA, 20 nt, synthetic construct
  misc_feature 1..20: note = Description of Artificial Sequence: Synthetic oligonucleotide
  source 1..20: mol_type = other RNA
tcgaactgttgattagaggt

SEQ ID NO: 1596 - RNA, 20 nt, synthetic construct
  misc_feature 1..20: note = Description of Artificial Sequence: Synthetic oligonucleotide
  source 1..20: mol_type = other RNA
cctggcagaccctcaagagc

SEQ ID NO: 1597 - RNA, 20 nt, synthetic construct
  misc_feature 1..20: note = Description of Artificial Sequence: Synthetic oligonucleotide
  source 1..20: mol_type = other RNA
cctggcagaccctcaagagc

SEQ ID NO: 1598 - RNA, 20 nt, synthetic construct
  misc_feature 1..20: note = Description of Artificial Sequence: Synthetic oligonucleotide
  source 1..20: mol_type = other RNA
ctggcagaccctcaagagca

SEQ ID NO: 1599 - RNA, 20 nt, synthetic construct
  misc_feature 1..20: note = Description of Artificial Sequence: Synthetic oligonucleotide
  source 1..20: mol_type = other RNA
tggcagaccctcaagagcag

SEQ ID NO: 1600 - RNA, 20 nt, synthetic construct
  misc_feature 1..20: note = Description of Artificial Sequence: Synthetic oligonucleotide
  source 1..20: mol_type = other RNA
ccctcaagagcaggggtctt

SEQ ID NO: 1601 - RNA, 20 nt, synthetic construct
  misc_feature 1..20: note = Description of Artificial Sequence: Synthetic oligonucleotide
  source 1..20: mol_type = other RNA
cctcaagagcaggggtcttc

SEQ ID NO: 1602 - RNA, 20 nt, synthetic construct
  misc_feature 1..20: note = Description of Artificial Sequence: Synthetic oligonucleotide
  source 1..20: mol_type = other RNA
taaggccagtggaaagaatt

SEQ ID NO: 1603 - RNA, 20 nt, synthetic construct
  misc_feature 1..20: note = Description of Artificial Sequence: Synthetic oligonucleotide
  source 1..20: mol_type = other RNA
aagagcaggggtcttctctt

SEQ ID NO: 1604 - RNA, 20 nt, synthetic construct
  misc_feature 1..20: note = Description of Artificial Sequence: Synthetic oligonucleotide
  source 1..20: mol_type = other RNA
agagcaggggtcttctcttt

SEQ ID NO: 1605 - RNA, 20 nt, synthetic construct
  misc_feature 1..20: note = Description of Artificial Sequence: Synthetic oligonucleotide
  source 1..20: mol_type = other RNA
gagcaggggtcttctctttg

SEQ ID NO: 1606 - RNA, 20 nt, synthetic construct
  misc_feature 1..20: note = Description of Artificial Sequence: Synthetic oligonucleotide
  source 1..20: mol_type = other RNA
agcaggggtcttctctttgg

SEQ ID NO: 1607 - RNA, 20 nt, synthetic construct
  misc_feature 1..20: note = Description of Artificial Sequence: Synthetic oligonucleotide
  source 1..20: mol_type = other RNA
aggggtcttctctttggggg

SEQ ID NO: 1608 - RNA, 20 nt, synthetic construct
  misc_feature 1..20: note = Description of Artificial Sequence: Synthetic oligonucleotide
  source 1..20: mol_type = other RNA
gggaggacatcactcttagc

SEQ ID NO: 1609 - RNA, 20 nt, synthetic construct
  misc_feature 1..20: note = Description of Artificial Sequence: Synthetic oligonucleotide
  source 1..20: mol_type = other RNA
ggaggacatcactcttagca

SEQ ID NO: 1610 - RNA, 20 nt, synthetic construct
  misc_feature 1..20: note = Description of Artificial Sequence: Synthetic oligonucleotide
  source 1..20: mol_type = other RNA
gccagactccaagttctgcc

SEQ ID NO: 1611 - RNA, 20 nt, synthetic construct
  misc_feature 1..20: note = Description of Artificial Sequence: Synthetic oligonucleotide
  source 1..20: mol_type = other RNA
gacatcactcttagcagggc

SEQ ID NO: 1612 - RNA, 20 nt, synthetic construct
  misc_feature 1..20: note = Description of Artificial Sequence: Synthetic oligonucleotide
  source 1..20: mol_type = other RNA
acatcactcttagcagggct

SEQ ID NO: 1613 - RNA, 20 nt, synthetic construct
  misc_feature 1..20: note = Description of Artificial Sequence: Synthetic oligonucleotide
  source 1..20: mol_type = other RNA
catcactcttagcagggctg

SEQ ID NO: 1614 - RNA, 20 nt, synthetic construct
  misc_feature 1..20: note = Description of Artificial Sequence: Synthetic oligonucleotide
  source 1..20: mol_type = other RNA
gctggggtgagtcaaaagtc

SEQ ID NO: 1615 - RNA, 20 nt, synthetic construct
  misc_feature 1..20: note = Description of Artificial Sequence: Synthetic oligonucleotide
  source 1..20: mol_type = other RNA
ctggggtgagtcaaaagtct

SEQ ID NO: 1616 - RNA, 20 nt, synthetic construct
  misc_feature 1..20: note = Description of Artificial Sequence: Synthetic oligonucleotide
  source 1..20: mol_type = other RNA
gagtcaaaagtctgggagaa

SEQ ID NO: 1617 - RNA, 20 nt, synthetic construct
  misc_feature 1..20: note = Description of Artificial Sequence: Synthetic oligonucleotide
  source 1..20: mol_type = other RNA
tcaaaagtctgggagaatgg

SEQ ID NO: 1618 - RNA, 20 nt, synthetic construct
  misc_feature 1..20: note = Description of Artificial Sequence: Synthetic oligonucleotide
  source 1..20: mol_type = other RNA
agtctgggagaatggaggtg

SEQ ID NO: 1619 - RNA, 20 nt, synthetic construct
  misc_feature 1..20: note = Description of Artificial Sequence: Synthetic oligonucleotide
  source 1..20: mol_type = other RNA
ctgggagaatggaggtgtgg

SEQ ID NO: 1620 - RNA, 20 nt, synthetic construct
  misc_feature 1..20: note = Description of Artificial Sequence: Synthetic oligonucleotide
  source 1..20: mol_type = other RNA
tgggagaatggaggtgtgga

SEQ ID NO: 1621 - RNA, 20 nt, synthetic construct
  misc_feature 1..20: note = Description of Artificial Sequence: Synthetic oligonucleotide
  source 1..20: mol_type = other RNA
gggagaatggaggtgtggag

SEQ ID NO: 1622 - RNA, 20 nt, synthetic construct
  misc_feature 1..20: note = Description of Artificial Sequence: Synthetic oligonucleotide
  source 1..20: mol_type = other RNA
ggaggtgtggaggggataac

SEQ ID NO: 1623 - RNA, 20 nt, synthetic construct
  misc_feature 1..20: note = Description of Artificial Sequence: Synthetic oligonucleotide
  source 1..20: mol_type = other RNA
ggcagcgaggagtccacagt

SEQ ID NO: 1624 - RNA, 20 nt, synthetic construct
  misc_feature 1..20: note = Description of Artificial Sequence: Synthetic oligonucleotide
  source 1..20: mol_type = other RNA
gaggtgtggaggggataact

SEQ ID NO: 1625 - RNA, 20 nt, synthetic construct
  misc_feature 1..20: note = Description of Artificial Sequence: Synthetic oligonucleotide
  source 1..20: mol_type = other RNA
aactgggtcagaccccaagc

SEQ ID NO: 1626 - RNA, 20 nt, synthetic construct
  misc_feature 1..20: note = Description of Artificial Sequence: Synthetic oligonucleotide
  source 1..20: mol_type = other RNA
gggtcagaccccaagcagga

SEQ ID NO: 1627 - RNA, 20 nt, synthetic construct
  misc_feature 1..20: note = Description of Artificial Sequence: Synthetic oligonucleotide
  source 1..20: mol_type = other RNA
ggtcagaccccaagcaggaa

SEQ ID NO: 1628 - RNA, 20 nt, synthetic construct
  misc_feature 1..20: note = Description of Artificial Sequence: Synthetic oligonucleotide
  source 1..20: mol_type = other RNA
ccccaagcaggaagggcctc

SEQ ID NO: 1629 - RNA, 20 nt, synthetic construct
  misc_feature 1..20: note = Description of Artificial Sequence: Synthetic oligonucleotide
  source 1..20: mol_type = other RNA
cccaagcaggaagggcctct

SEQ ID NO: 1630 - RNA, 20 nt, synthetic construct
  misc_feature 1..20: note = Description of Artificial Sequence: Synthetic oligonucleotide
  source 1..20: mol_type = other RNA
ccaagcaggaagggcctcta

SEQ ID NO: 1631 - RNA, 20 nt, synthetic construct
  misc_feature 1..20: note = Description of Artificial Sequence: Synthetic oligonucleotide
  source 1..20: mol_type = other RNA
aggaagggcctctatgtaga

SEQ ID NO: 1632 - RNA, 20 nt, synthetic construct
  misc_feature 1..20: note = Description of Artificial Sequence: Synthetic oligonucleotide
  source 1..20: mol_type = other RNA
ggaagggcctctatgtagac

SEQ ID NO: 1633 - RNA, 20 nt, synthetic construct
  misc_feature 1..20: note = Description of Artificial Sequence: Synthetic oligonucleotide
  source 1..20: mol_type = other RNA
cctctatgtagacgggtgtg

SEQ ID NO: 1634 - RNA, 20 nt, synthetic construct
  misc_feature 1..20: note = Description of Artificial Sequence: Synthetic oligonucleotide
  source 1..20: mol_type = other RNA
cctctatgtagacgggtgtg

SEQ ID NO: 1635 - RNA, 20 nt, synthetic construct
  misc_feature 1..20: note = Description of Artificial Sequence: Synthetic oligonucleotide
  source 1..20: mol_type = other RNA
gacgggtgtgtggctcctta

SEQ ID NO: 1636 - RNA, 20 nt, synthetic construct
  misc_feature 1..20: note = Description of Artificial Sequence: Synthetic oligonucleotide
  source 1..20: mol_type = other RNA
ccttaaggtgacccagcagc

SEQ ID NO: 1637 - RNA, 20 nt, synthetic construct
  misc_feature 1..20: note = Description of Artificial Sequence: Synthetic oligonucleotide
  source 1..20: mol_type = other RNA
ttaaggtgacccagcagccc

SEQ ID NO: 1638 - RNA, 20 nt, synthetic construct
  misc_feature 1..20: note = Description of Artificial Sequence: Synthetic oligonucleotide
  source 1..20: mol_type = other RNA
taaggtgacccagcagccct

SEQ ID NO: 1639 - RNA, 20 nt, synthetic construct
  misc_feature 1..20: note = Description of Artificial Sequence: Synthetic oligonucleotide
  source 1..20: mol_type = other RNA
cccagcagccctgggcacag

SEQ ID NO: 1640 - RNA, 20 nt, synthetic construct
  misc_feature 1..20: note = Description of Artificial Sequence: Synthetic oligonucleotide
  source 1..20: mol_type = other RNA
ccagcagccctgggcacaga

SEQ ID NO: 1641 - RNA, 20 nt, synthetic construct
  misc_feature 1..20: note = Description of Artificial Sequence: Synthetic oligonucleotide
  source 1..20: mol_type = other RNA
gccagactccaagttctgcc

SEQ ID NO: 1642 - RNA, 20 nt, synthetic construct
  misc_feature 1..20: note = Description of Artificial Sequence: Synthetic oligonucleotide
  source 1..20: mol_type = other RNA
agcagccctgggcacagaag

SEQ ID NO: 1643 - RNA, 20 nt, synthetic construct
  misc_feature 1..20: note = Description of Artificial Sequence: Synthetic oligonucleotide
  source 1..20: mol_type = other RNA
ccctgggcacagaagtggtg

SEQ ID NO: 1644 - RNA, 20 nt, synthetic construct
  misc_feature 1..20: note = Description of Artificial Sequence: Synthetic oligonucleotide
  source 1..20: mol_type = other RNA
cctgggcacagaagtggtgc

SEQ ID NO: 1645 - RNA, 20 nt, synthetic construct
  misc_feature 1..20: note = Description of Artificial Sequence: Synthetic oligonucleotide
  source 1..20: mol_type = other RNA
ctgggcacagaagtggtgcg

SEQ ID NO: 1646 - RNA, 20 nt, synthetic construct
  misc_feature 1..20: note = Description of Artificial Sequence: Synthetic oligonucleotide
  source 1..20: mol_type = other RNA
tgccaacagtgataaccagc

SEQ ID NO: 1647 - RNA, 20 nt, synthetic construct
  misc_feature 1..20: note = Description of Artificial Sequence: Synthetic oligonucleotide
  source 1..20: mol_type = other RNA
gccaacagtgataaccagca

SEQ ID NO: 1648 - RNA, 20 nt, synthetic construct
  misc_feature 1..20: note = Description of Artificial Sequence: Synthetic oligonucleotide
  source 1..20: mol_type = other RNA
taaggccagtggaaagaatt

SEQ ID NO: 1649 - RNA, 20 nt, synthetic construct
  misc_feature 1..20: note = Description of Artificial Sequence: Synthetic oligonucleotide
  source 1..20: mol_type = other RNA
ccaacagtgataaccagcag

SEQ ID NO: 1650 - RNA, 20 nt, synthetic construct
  misc_feature 1..20: note = Description of Artificial Sequence: Synthetic oligonucleotide
  source 1..20: mol_type = other RNA
ccagcagggcctgtcagaag

SEQ ID NO: 1651 - RNA, 20 nt, synthetic construct
  misc_feature 1..20: note = Description of Artificial Sequence: Synthetic oligonucleotide
  source 1..20: mol_type = other RNA
ccagcagggcctgtcagaag

SEQ ID NO: 1652 - RNA, 20 nt, synthetic construct
  misc_feature 1..20: note = Description of Artificial Sequence: Synthetic oligonucleotide
  source 1..20: mol_type = other RNA
gggcctgtcagaagaggccc

SEQ ID NO: 1653 - RNA, 20 nt, synthetic construct
  misc_feature 1..20: note = Description of Artificial Sequence: Synthetic oligonucleotide
  source 1..20: mol_type = other RNA
cctgtcagaagaggccctgg

SEQ ID NO: 1654 - RNA, 20 nt, synthetic construct
  misc_feature 1..20: note = Description of Artificial Sequence: Synthetic oligonucleotide
  source 1..20: mol_type = other RNA
gaagaggccctggacactga

SEQ ID NO: 1655 - RNA, 20 nt, synthetic construct
  misc_feature 1..20: note = Description of Artificial Sequence: Synthetic oligonucleotide
  source 1..20: mol_type = other RNA
aggccctggacactgaaggc

SEQ ID NO: 1656 - RNA, 20 nt, synthetic construct
  misc_feature 1..20: note = Description of Artificial Sequence: Synthetic oligonucleotide
  source 1..20: mol_type = other RNA
ggccctggacactgaaggct

SEQ ID NO: 1657 - RNA, 20 nt, synthetic construct
  misc_feature 1..20: note = Description of Artificial Sequence: Synthetic oligonucleotide
  source 1..20: mol_type = other RNA
tctttccactggccttaacc

SEQ ID NO: 1658 - RNA, 20 nt, synthetic construct
  misc_feature 1..20: note = Description of Artificial Sequence: Synthetic oligonucleotide
  source 1..20: mol_type = other RNA
ccctggacactgaaggctgg

SEQ ID NO: 1659 - RNA, 20 nt, synthetic construct
  misc_feature 1..20: note = Description of Artificial Sequence: Synthetic oligonucleotide
  source 1..20: mol_type = other RNA
cctggacactgaaggctggg

SEQ ID NO: 1660 - RNA, 20 nt, synthetic construct
  misc_feature 1..20: note = Description of Artificial Sequence: Synthetic oligonucleotide
  source 1..20: mol_type = other RNA
ctgaaggctgggcacagcct

SEQ ID NO: 1661 - RNA, 20 nt, synthetic construct
  misc_feature 1..20: note = Description of Artificial Sequence: Synthetic oligonucleotide
  source 1..20: mol_type = other RNA
tgaaggctgggcacagcctt

SEQ ID NO: 1662 - RNA, 20 nt, synthetic construct
  misc_feature 1..20: note = Description of Artificial Sequence: Synthetic oligonucleotide
  source 1..20: mol_type = other RNA
gaaggctgggcacagccttg

SEQ ID NO: 1663 - RNA, 20 nt, synthetic construct
  misc_feature 1..20: note = Description of Artificial Sequence: Synthetic oligonucleotide
  source 1..20: mol_type = other RNA
cagccttggggaccgctcac

SEQ ID NO: 1664 - RNA, 20 nt, synthetic construct
  misc_feature 1..20: note = Description of Artificial Sequence: Synthetic oligonucleotide
  source 1..20: mol_type = other RNA
ccttggggaccgctcacagg

SEQ ID NO: 1665 - RNA, 20 nt, synthetic construct
  misc_feature 1..20: note = Description of Artificial Sequence: Synthetic oligonucleotide
  source 1..20: mol_type = other RNA
ccgctcacaggacatgcagc

SEQ ID NO: 1666 - RNA, 20 nt, synthetic construct
  misc_feature 1..20: note = Description of Artificial Sequence: Synthetic oligonucleotide
  source 1..20: mol_type = other RNA
ccgacaactccctaccgcga

SEQ ID NO: 1667 - RNA, 20 nt, synthetic construct
  misc_feature 1..20: note = Description of Artificial Sequence: Synthetic oligonucleotide
  source 1..20: mol_type = other RNA
ccctaccgcgacccctatca

SEQ ID NO: 1668 - RNA, 20 nt, synthetic construct
  misc_feature 1..20: note = Description of Artificial Sequence: Synthetic oligonucleotide
  source 1..20: mol_type = other RNA
cctaccgcgacccctatcag

SEQ ID NO: 1669 - RNA, 20 nt, synthetic construct
  misc_feature 1..20: note = Description of Artificial Sequence: Synthetic oligonucleotide
  source 1..20: mol_type = other RNA
ccgcgacccctatcagtgcc

SEQ ID NO: 1670 - RNA, 20 nt, synthetic construct
  misc_feature 1..20: note = Description of Artificial Sequence: Synthetic oligonucleotide
  source 1..20: mol_type = other RNA
cccctatcagtgccgaccaa

SEQ ID NO: 1671 - RNA, 20 nt, synthetic construct
  misc_feature 1..20: note = Description of Artificial Sequence: Synthetic oligonucleotide
  source 1..20: mol_type = other RNA
ccctatcagtgccgaccaag

SEQ ID NO: 1672 - RNA, 20 nt, synthetic construct
  misc_feature 1..20: note = Description of Artificial Sequence: Synthetic oligonucleotide
  source 1..20: mol_type = other RNA
cctatcagtgccgaccaagc

SEQ ID NO: 1673 - RNA, 20 nt, synthetic construct
  misc_feature 1..20: note = Description of Artificial Sequence: Synthetic oligonucleotide
  source 1..20: mol_type = other RNA
ccgaccaagcacacaagatg

SEQ ID NO: 1674 - RNA, 20 nt, synthetic construct
  misc_feature 1..20: note = Description of Artificial Sequence: Synthetic oligonucleotide
  source 1..20: mol_type = other RNA
ccaagcacacaagatgcaca

SEQ ID NO: 1675 - RNA, 20 nt, synthetic construct
  misc_feature 1..20: note = Description of Artificial Sequence: Synthetic oligonucleotide
  source 1..20: mol_type = other RNA
agcacacaagatgcacaccc

SEQ ID NO: 1676 - RNA, 20 nt, synthetic construct
  misc_feature 1..20: note = Description of Artificial Sequence: Synthetic oligonucleotide
  source 1..20: mol_type = other RNA
cacaagatgcacacccaggc

SEQ ID NO: 1677 - RNA, 20 nt, synthetic construct
  misc_feature 1..20: note = Description of Artificial Sequence: Synthetic oligonucleotide
  source 1..20: mol_type = other RNA
acaagatgcacacccaggct

SEQ ID NO: 1678 - RNA, 20 nt, synthetic construct
  misc_feature 1..20: note = Description of Artificial Sequence: Synthetic oligonucleotide
  source 1..20: mol_type = other RNA
tctttccactggccttaacc

SEQ ID NO: 1679 - RNA, 20 nt, synthetic construct
  misc_feature 1..20: note = Description of Artificial Sequence: Synthetic oligonucleotide
  source 1..20: mol_type = other RNA
gatgcacacccaggctgggc

SEQ ID NO: 1680 - RNA, 20 nt, synthetic construct
  misc_feature 1..20: note = Description of Artificial Sequence: Synthetic oligonucleotide
  source 1..20: mol_type = other RNA
acccaggctgggctggacag

SEQ ID NO: 1681 - RNA, 20 nt, synthetic construct
  misc_feature 1..20: note = Description of Artificial Sequence: Synthetic oligonucleotide
  source 1..20: mol_type = other RNA
cccaggctgggctggacaga

SEQ ID NO: 1682 - RNA, 20 nt, synthetic construct
  misc_feature 1..20: note = Description of Artificial Sequence: Synthetic oligonucleotide
  source 1..20: mol_type = other RNA
cccaggctgggctggacaga

SEQ ID NO: 1683 - RNA, 20 nt, synthetic construct
  misc_feature 1..20: note = Description of Artificial Sequence: Synthetic oligonucleotide
  source 1..20: mol_type = other RNA
ccaggctgggctggacagag

SEQ ID NO: 1684 - RNA, 20 nt, synthetic construct
  misc_feature 1..20: note = Description of Artificial Sequence: Synthetic oligonucleotide
  source 1..20: mol_type = other RNA
ccaggctgggctggacagag

SEQ ID NO: 1685 - RNA, 20 nt, synthetic construct
  misc_feature 1..20: note = Description of Artificial Sequence: Synthetic oligonucleotide
  source 1..20: mol_type = other RNA
gaggggtcccacaagatcac

SEQ ID NO: 1686 - RNA, 20 nt, synthetic construct
  misc_feature 1..20: note = Description of Artificial Sequence: Synthetic oligonucleotide
  source 1..20: mol_type = other RNA
aggggtcccacaagatcaca

SEQ ID NO: 1687 - RNA, 20 nt, synthetic construct
  misc_feature 1..20: note = Description of Artificial Sequence: Synthetic oligonucleotide
  source 1..20: mol_type = other RNA
cccacaagatcacagggtgt

SEQ ID NO: 1688 - RNA, 20 nt, synthetic construct
  misc_feature 1..20: note = Description of Artificial Sequence: Synthetic oligonucleotide
  source 1..20: mol_type = other RNA
ggcagcgaggagtccacagt

SEQ ID NO: 1689 - RNA, 20 nt, synthetic construct
  misc_feature 1..20: note = Description of Artificial Sequence: Synthetic oligonucleotide
  source 1..20: mol_type = other RNA
ccacaagatcacagggtgtg

SEQ ID NO: 1690 - RNA, 20 nt, synthetic construct
  misc_feature 1..20: note = Description of Artificial Sequence: Synthetic oligonucleotide
  source 1..20: mol_type = other RNA
tcacagggtgtgccctgaga

SEQ ID NO: 1691 - RNA, 20 nt, synthetic construct
  misc_feature 1..20: note = Description of Artificial Sequence: Synthetic oligonucleotide
  source 1..20: mol_type = other RNA
cagggtgtgccctgagaagg

SEQ ID NO: 1692 - RNA, 20 nt, synthetic construct
  misc_feature 1..20: note = Description of Artificial Sequence: Synthetic oligonucleotide
  source 1..20: mol_type = other RNA
cgaactgttgattagaggta

SEQ ID NO: 1693 - RNA, 20 nt, synthetic construct
  misc_feature 1..20: note = Description of Artificial Sequence: Synthetic oligonucleotide
  source 1..20: mol_type = other RNA
atgattttaatctgtgacct

SEQ ID NO: 1694 - RNA, 20 nt, synthetic construct
  misc_feature 1..20: note = Description of Artificial Sequence: Synthetic oligonucleotide
  source 1..20: mol_type = other RNA
taatctgtgaccttggtgaa

SEQ ID NO: 1695 - RNA, 20 nt, synthetic construct
  misc_feature 1..20: note = Description of Artificial Sequence: Synthetic oligonucleotide
  source 1..20: mol_type = other RNA
aatctgtgaccttggtgaat

SEQ ID NO: 1696 - RNA, 20 nt, synthetic construct
  misc_feature 1..20: note = Description of Artificial Sequence: Synthetic oligonucleotide
  source 1..20: mol_type = other RNA
agctacttgcccattcacca

SEQ ID NO: 1697 - RNA, 20 nt, synthetic construct
  misc_feature 1..20: note = Description of Artificial Sequence: Synthetic oligonucleotide
  source 1..20: mol_type = other RNA
tagctatctaatgactaaaa

SEQ ID NO: 1698 - RNA, 20 nt, synthetic construct
  misc_feature 1..20: note = Description of Artificial Sequence: Synthetic oligonucleotide
  source 1..20: mol_type = other RNA
atgactaaaatggaaaacac

SEQ ID NO: 1699 - RNA, 20 nt, synthetic construct
  misc_feature 1..20: note = Description of Artificial Sequence: Synthetic oligonucleotide
  source 1..20: mol_type = other RNA
aaatacccatgctgagtctg

SEQ ID NO: 1700 - RNA, 20 nt, synthetic construct
  misc_feature 1..20: note = Description of Artificial Sequence: Synthetic oligonucleotide
  source 1..20: mol_type = other RNA
aggcacctcagactcagcat

SEQ ID NO: 1701 - RNA, 20 nt, synthetic construct
  misc_feature 1..20: note = Description of Artificial Sequence: Synthetic oligonucleotide
  source 1..20: mol_type = other RNA
taggcacctcagactcagca

SEQ ID NO: 1702 - RNA, 20 nt, synthetic construct
  misc_feature 1..20: note = Description of Artificial Sequence: Synthetic oligonucleotide
  source 1..20: mol_type = other RNA
gctgagtctgaggtgcctat

SEQ ID NO: 1703 - RNA, 20 nt, synthetic construct
  misc_feature 1..20: note = Description of Artificial Sequence: Synthetic oligonucleotide
  source 1..20: mol_type = other RNA
tatttatatagatgtcctat

SEQ ID NO: 1704 - RNA, 20 nt, synthetic construct
  misc_feature 1..20: note = Description of Artificial Sequence: Synthetic oligonucleotide
  source 1..20: mol_type = other RNA
catatatcaaacaatgtact

SEQ ID NO: 1705 - RNA, 20 nt, synthetic construct
  misc_feature 1..20: note = Description of Artificial Sequence: Synthetic oligonucleotide
  source 1..20: mol_type = other RNA
ccagtacattgtttgatata

SEQ ID NO: 1706 - RNA, 20 nt, synthetic construct
  misc_feature 1..20: note = Description of Artificial Sequence: Synthetic oligonucleotide
  source 1..20: mol_type = other RNA
ccatatatcaaacaatgtac

SEQ ID NO: 1707 - RNA, 20 nt, synthetic construct
  misc_feature 1..20: note = Description of Artificial Sequence: Synthetic oligonucleotide
  source 1..20: mol_type = other RNA
cagtacattgtttgatatat

SEQ ID NO: 1708 - RNA, 20 nt, synthetic construct
  misc_feature 1..20: note = Description of Artificial Sequence: Synthetic oligonucleotide
  source 1..20: mol_type = other RNA
cattgtttgatatatgggtt

SEQ ID NO: 1709 - RNA, 20 nt, synthetic construct
  misc_feature 1..20: note = Description of Artificial Sequence: Synthetic oligonucleotide
  source 1..20: mol_type = other RNA
gatatatgggtttggcactg

SEQ ID NO: 1710 - RNA, 20 nt, synthetic construct
  misc_feature 1..20: note = Description of Artificial Sequence: Synthetic oligonucleotide
  source 1..20: mol_type = other RNA
tatgggtttggcactgaggt

SEQ ID NO: 1711 - RNA, 20 nt, synthetic construct
  misc_feature 1..20: note = Description of Artificial Sequence: Synthetic oligonucleotide
  source 1..20: mol_type = other RNA
gggtttggcactgaggttgg

SEQ ID NO: 1712 - RNA, 20 nt, synthetic construct
  misc_feature 1..20: note = Description of Artificial Sequence: Synthetic oligonucleotide
  source 1..20: mol_type = other RNA
gcactgaggttggaggtcag

SEQ ID NO: 1713 - RNA, 20 nt, synthetic construct
  misc_feature 1..20: note = Description of Artificial Sequence: Synthetic oligonucleotide
  source 1..20: mol_type = other RNA
cagaggttagaaatcagagt

SEQ ID NO: 1714 - RNA, 20 nt, synthetic construct
  misc_feature 1..20: note = Description of Artificial Sequence: Synthetic oligonucleotide
  source 1..20: mol_type = other RNA
agaggttagaaatcagagtt

SEQ ID NO: 1715 - RNA, 20 nt, synthetic construct
  misc_feature 1..20: note = Description of Artificial Sequence: Synthetic oligonucleotide
  source 1..20: mol_type = other RNA
tagaaatcagagttgggaat

SEQ ID NO: 1716 - RNA, 20 nt, synthetic construct
  misc_feature 1..20: note = Description of Artificial Sequence: Synthetic oligonucleotide
  source 1..20: mol_type = other RNA
agaaatcagagttgggaatt

SEQ ID NO: 1717 - RNA, 20 nt, synthetic construct
  misc_feature 1..20: note = Description of Artificial Sequence: Synthetic oligonucleotide
  source 1..20: mol_type = other RNA
gttgggaattgggattatac

SEQ ID NO: 1718 - RNA, 20 nt, synthetic construct
  misc_feature 1..20: note = Description of Artificial Sequence: Synthetic oligonucleotide
  source 1..20: mol_type = other RNA
ctttgtattcatcacactct

SEQ ID NO: 1719 - RNA, 20 nt, synthetic construct
  misc_feature 1..20: note = Description of Artificial Sequence: Synthetic oligonucleotide
  source 1..20: mol_type = other RNA
atgaatacaaagttaaatga

SEQ ID NO: 1720 - RNA, 20 nt, synthetic construct
  misc_feature 1..20: note = Description of Artificial Sequence: Synthetic oligonucleotide
  source 1..20: mol_type = other RNA
taaatgttggtgttcattaa

SEQ ID NO: 1721 - RNA, 20 nt, synthetic construct
  misc_feature 1..20: note = Description of Artificial Sequence: Synthetic oligonucleotide
  source 1..20: mol_type = other RNA
tgagatttcacattaaatgt

SEQ ID NO: 1722 - RNA, 20 nt, synthetic construct
  misc_feature 1..20: note = Description of Artificial Sequence: Synthetic oligonucleotide
  source 1..20: mol_type = other RNA
acatttaatgtgaaatctca

SEQ ID NO: 1723 - RNA, 20 nt, synthetic construct
  misc_feature 1..20: note = Description of Artificial Sequence: Synthetic oligonucleotide
  source 1..20: mol_type = other RNA
taaaatcatcggggattttg

SEQ ID NO: 1724 - RNA, 20 nt, synthetic construct
  misc_feature 1..20: note = Description of Artificial Sequence: Synthetic oligonucleotide
  source 1..20: mol_type = other RNA
ctaaaatcatcggggatttt

SEQ ID NO: 1725 - RNA, 20 nt, synthetic construct
  misc_feature 1..20: note = Description of Artificial Sequence: Synthetic oligonucleotide
  source 1..20: mol_type = other RNA
tctaaaatcatcggggattt

SEQ ID NO: 1726 - RNA, 20 nt, synthetic construct
  misc_feature 1..20: note = Description of Artificial Sequence: Synthetic oligonucleotide
  source 1..20: mol_type = other RNA
actgagttctaaaatcatcg

SEQ ID NO: 1727 - RNA, 20 nt, synthetic construct
  misc_feature 1..20: note = Description of Artificial Sequence: Synthetic oligonucleotide
  source 1..20: mol_type = other RNA
tactgagttctaaaatcatc

SEQ ID NO: 1728 - RNA, 20 nt, synthetic construct
  misc_feature 1..20: note = Description of Artificial Sequence: Synthetic oligonucleotide
  source 1..20: mol_type = other RNA
atactgagttctaaaatcat

SEQ ID NO: 1729 - RNA, 20 nt, synthetic construct
  misc_feature 1..20: note = Description of Artificial Sequence: Synthetic oligonucleotide
  source 1..20: mol_type = other RNA
taattagtgtaatgccaatg

SEQ ID NO: 1730 - RNA, 20 nt, synthetic construct
  misc_feature 1..20: note = Description of Artificial Sequence: Synthetic oligonucleotide
  source 1..20: mol_type = other RNA
aattagtgtaatgccaatgt

SEQ ID NO: 1731 - RNA, 20 nt, synthetic construct
  misc_feature 1..20: note = Description of Artificial Sequence: Synthetic oligonucleotide
  source 1..20: mol_type = other RNA
aatgccaatgtgggttagaa

SEQ ID NO: 1732 - RNA, 20 nt, synthetic construct
  misc_feature 1..20: note = Description of Artificial Sequence: Synthetic oligonucleotide
  source 1..20: mol_type = other RNA
acttccattctaacccacat

SEQ ID NO: 1733 - RNA, 20 nt, synthetic construct
  misc_feature 1..20: note = Description of Artificial Sequence: Synthetic oligonucleotide
  source 1..20: mol_type = other RNA
aatggaagtcaacttgctgt

SEQ ID NO: 1734 - RNA, 20 nt, synthetic construct
  misc_feature 1..20: note = Description of Artificial Sequence: Synthetic oligonucleotide
  source 1..20: mol_type = other RNA
cttgctgttggtttcagagc

SEQ ID NO: 1735 - RNA, 20 nt, synthetic construct
  misc_feature 1..20: note = Description of Artificial Sequence: Synthetic oligonucleotide
  source 1..20: mol_type = other RNA
ctgttggtttcagagcaggt

SEQ ID NO: 1736 - RNA, 20 nt, synthetic construct
  misc_feature 1..20: note = Description of Artificial Sequence: Synthetic oligonucleotide
  source 1..20: mol_type = other RNA
ttcagagcaggtaggagata

SEQ ID NO: 1737 - RNA, 20 nt, synthetic construct
  misc_feature 1..20: note = Description of Artificial Sequence: Synthetic oligonucleotide
  source 1..20: mol_type = other RNA
agtgaaaagctgaaacaaaa

SEQ ID NO: 1738 - RNA, 20 nt, synthetic construct
  misc_feature 1..20: note = Description of Artificial Sequence: Synthetic oligonucleotide
  source 1..20: mol_type = other RNA
aagctgaaacaaaaaggaaa

SEQ ID NO: 1739 - RNA, 20 nt, synthetic construct
  misc_feature 1..20: note = Description of Artificial Sequence: Synthetic oligonucleotide
  source 1..20: mol_type = other RNA
tgaaacaaaaaggaaaaggt

SEQ ID NO: 1740 - RNA, 20 nt, synthetic construct
  misc_feature 1..20: note = Description of Artificial Sequence: Synthetic oligonucleotide
  source 1..20: mol_type = other RNA
gaaacaaaaaggaaaaggta

SEQ ID NO: 1741 - RNA, 20 nt, synthetic construct
  misc_feature 1..20: note = Description of Artificial Sequence: Synthetic oligonucleotide
  source 1..20: mol_type = other RNA
ggaaaaggtagggtgaaaga

SEQ ID NO: 1742 - RNA, 20 nt, synthetic construct
  misc_feature 1..20: note = Description of Artificial Sequence: Synthetic oligonucleotide
  source 1..20: mol_type = other RNA
gaaaaggtagggtgaaagat

SEQ ID NO: 1743 - RNA, 20 nt, synthetic construct
  misc_feature 1..20: note = Description of Artificial Sequence: Synthetic oligonucleotide
  source 1..20: mol_type = other RNA
aaagatgggaaatgtatgta

SEQ ID NO: 1744 - RNA, 20 nt, synthetic construct
  misc_feature 1..20: note = Description of Artificial Sequence: Synthetic oligonucleotide
  source 1..20: mol_type = other RNA
gatgggaaatgtatgtaagg

SEQ ID NO: 1745 - RNA, 20 nt, synthetic construct
  misc_feature 1..20: note = Description of Artificial Sequence: Synthetic oligonucleotide
  source 1..20: mol_type = other RNA
tgtaaggaggatgagccaca

SEQ ID NO: 1746 - RNA, 20 nt, synthetic construct
  misc_feature 1..20: note = Description of Artificial Sequence: Synthetic oligonucleotide
  source 1..20: mol_type = other RNA
ggaggatgagccacatggta

SEQ ID NO: 1747 - RNA, 20 nt, synthetic construct
  misc_feature 1..20: note = Description of Artificial Sequence: Synthetic oligonucleotide
  source 1..20: mol_type = other RNA
gaggatgagccacatggtat

SEQ ID NO: 1748 - RNA, 20 nt, synthetic construct
  misc_feature 1..20: note = Description of Artificial Sequence: Synthetic oligonucleotide
  source 1..20: mol_type = other RNA
gatgagccacatggtatggg

SEQ ID NO: 1749 - RNA, 20 nt, synthetic construct
  misc_feature 1..20: note = Description of Artificial Sequence: Synthetic oligonucleotide
  source 1..20: mol_type = other RNA
agtatacctcccataccatg

SEQ ID NO: 1750 - RNA, 20 nt, synthetic construct
  misc_feature 1..20: note = Description of Artificial Sequence: Synthetic oligonucleotide
  source 1..20: mol_type = other RNA
atggtatgggaggtatacta

SEQ ID NO: 1751 - RNA, 20 nt, synthetic construct
  misc_feature 1..20: note = Description of Artificial Sequence: Synthetic oligonucleotide
  source 1..20: mol_type = other RNA
ggaggtatactaaggactct

SEQ ID NO: 1752 - RNA, 20 nt, synthetic construct
  misc_feature 1..20: note = Description of Artificial Sequence: Synthetic oligonucleotide
  source 1..20: mol_type = other RNA
gaggtatactaaggactcta

SEQ ID NO: 1753 - RNA, 20 nt, synthetic construct
  misc_feature 1..20: note = Description of Artificial Sequence: Synthetic oligonucleotide
  source 1..20: mol_type = other RNA
actctagggtcagagaaata

SEQ ID NO: 1754 - RNA, 20 nt, synthetic construct
  misc_feature 1..20: note = Description of Artificial Sequence: Synthetic oligonucleotide
  source 1..20: mol_type = other RNA
ctctagggtcagagaaatat

SEQ ID NO: 1755 - RNA, 20 nt, synthetic construct
  misc_feature 1..20: note = Description of Artificial Sequence: Synthetic oligonucleotide
  source 1..20: mol_type = other RNA
aagaatgtgaattttgtaga

SEQ ID NO: 1756 - RNA, 20 nt, synthetic construct
  misc_feature 1..20: note = Description of Artificial Sequence: Synthetic oligonucleotide
  source 1..20: mol_type = other RNA
ttctacaaaattcacattct

SEQ ID NO: 1757 - RNA, 20 nt, synthetic construct
  misc_feature 1..20: note = Description of Artificial Sequence: Synthetic oligonucleotide
  source 1..20: mol_type = other RNA
acaaaattcacattcttggc

SEQ ID NO: 1758 - RNA, 20 nt, synthetic construct
  misc_feature 1..20: note = Description of Artificial Sequence: Synthetic oligonucleotide
  source 1..20: mol_type = other RNA
caaaattcacattcttggct

SEQ ID NO: 1759 - RNA, 20 nt, synthetic construct
  misc_feature 1..20: note = Description of Artificial Sequence: Synthetic oligonucleotide
  source 1..20: mol_type = other RNA
ttcacattcttggctgggtg

SEQ ID NO: 1760 - RNA, 20 nt, synthetic construct
  misc_feature 1..20: note = Description of Artificial Sequence: Synthetic oligonucleotide
  source 1..20: mol_type = other RNA
agggtggatcacctgatgtt

SEQ ID NO: 1761 - RNA, 20 nt, synthetic construct
  misc_feature 1..20: note = Description of Artificial Sequence: Synthetic oligonucleotide
  source 1..20: mol_type = other RNA
gatctcgaactcctaacatc

SEQ ID NO: 1762 - RNA, 100 nt, synthetic construct; identical to SEQ ID NO: 342
  misc_feature 1..100: note = Description of Artificial Sequence: Synthetic polynucleotide
  source 1..100: mol_type = other RNA
  modified_base 1: mod_base = OTHER; note = 2'-O-methyl modified nucleotide with phosphorothioate linkage
  modified_base 2: mod_base = OTHER; note = 2'-O-methyl modified nucleotide with phosphorothioate linkage
  modified_base 3: mod_base = OTHER; note = 2'-O-methyl modified nucleotide with phosphorothioate linkage
  modified_base 97: mod_base = OTHER; note = 2'-O-methyl modified nucleotide with phosphorothioate linkage
  modified_base 98: mod_base = OTHER; note = 2'-O-methyl modified nucleotide with phosphorothioate linkage
  modified_base 99: mod_base = OTHER; note = 2'-O-methyl modified nucleotide with phosphorothioate linkage

SEQ ID NO: 1763 - RNA, 100 nt, synthetic construct; identical to SEQ ID NO: 347
  misc_feature 1..100: note = Description of Artificial Sequence: Synthetic polynucleotide
  source 1..100: mol_type = other RNA
  modified_base 1: mod_base = OTHER; note = 2'-O-methyl modified nucleotide with phosphorothioate linkage
  modified_base 2: mod_base = OTHER; note = 2'-O-methyl modified nucleotide with phosphorothioate linkage
  modified_base 3: mod_base = OTHER; note = 2'-O-methyl modified nucleotide with phosphorothioate linkage
  modified_base 97: mod_base = OTHER; note = 2'-O-methyl modified nucleotide with phosphorothioate linkage
  modified_base 98: mod_base = OTHER; note = 2'-O-methyl modified nucleotide with phosphorothioate linkage
  modified_base 99: mod_base = OTHER; note = 2'-O-methyl modified nucleotide with phosphorothioate linkage

SEQ ID NO: 1764 - RNA, 100 nt, synthetic construct; identical to SEQ ID NO: 351
  misc_feature 1..100: note = Description of Artificial Sequence: Synthetic polynucleotide
  source 1..100: mol_type = other RNA
  modified_base 1: mod_base = OTHER; note = 2'-O-methyl modified nucleotide with phosphorothioate linkage
  modified_base 2: mod_base = OTHER; note = 2'-O-methyl modified nucleotide with phosphorothioate linkage
  modified_base 3: mod_base = OTHER; note = 2'-O-methyl modified nucleotide with phosphorothioate linkage
  modified_base 97: mod_base = OTHER; note = 2'-O-methyl modified nucleotide with phosphorothioate linkage
  modified_base 98: mod_base = OTHER; note = 2'-O-methyl modified nucleotide with phosphorothioate linkage
  modified_base 99: mod_base = OTHER; note = 2'-O-methyl modified nucleotide with phosphorothioate linkage

SEQ ID NO: 1765 - RNA, 100 nt, synthetic construct; identical to SEQ ID NO: 355
  misc_feature 1..100: note = Description of Artificial Sequence: Synthetic polynucleotide
  source 1..100: mol_type = other RNA
  modified_base 1: mod_base = OTHER; note = 2'-O-methyl modified nucleotide with phosphorothioate linkage
  modified_base 2: mod_base = OTHER; note = 2'-O-methyl modified nucleotide with phosphorothioate linkage
  modified_base 3: mod_base = OTHER; note = 2'-O-methyl modified nucleotide with phosphorothioate linkage
  modified_base 97: mod_base = OTHER; note = 2'-O-methyl modified nucleotide with phosphorothioate linkage
  modified_base 98: mod_base = OTHER; note = 2'-O-methyl modified nucleotide with phosphorothioate linkage
  modified_base 99: mod_base = OTHER; note = 2'-O-methyl modified nucleotide with phosphorothioate linkage

SEQ ID NO: 1766 - RNA, 100 nt, synthetic construct; identical to SEQ ID NO: 359
  misc_feature 1..100: note = Description of Artificial Sequence: Synthetic polynucleotide
  source 1..100: mol_type = other RNA
  modified_base 1: mod_base = OTHER; note = 2'-O-methyl modified nucleotide with phosphorothioate linkage
  modified_base 2: mod_base = OTHER; note = 2'-O-methyl modified nucleotide with phosphorothioate linkage
  modified_base 3: mod_base = OTHER; note = 2'-O-methyl modified nucleotide with phosphorothioate linkage
  modified_base 97: mod_base = OTHER; note = 2'-O-methyl modified nucleotide with phosphorothioate linkage
  modified_base 98: mod_base = OTHER; note = 2'-O-methyl modified nucleotide with phosphorothioate linkage
  modified_base 99: mod_base = OTHER; note = 2'-O-methyl modified nucleotide with phosphorothioate linkage

SEQ ID NO: 1767 - RNA, 100 nt, synthetic construct; identical to SEQ ID NO: 363
  misc_feature 1..100: note = Description of Artificial Sequence: Synthetic polynucleotide
  source 1..100: mol_type = other RNA
  modified_base 1: mod_base = OTHER; note = 2'-O-methyl modified nucleotide with phosphorothioate linkage
  modified_base 2: mod_base = OTHER; note = 2'-O-methyl modified nucleotide with phosphorothioate linkage
  modified_base 3: mod_base = OTHER; note = 2'-O-methyl modified nucleotide with phosphorothioate linkage
  modified_base 97: mod_base = OTHER; note = 2'-O-methyl modified nucleotide with phosphorothioate linkage
  modified_base 98: mod_base = OTHER; note = 2'-O-methyl modified nucleotide with phosphorothioate linkage
  modified_base 99: mod_base = OTHER; note = 2'-O-methyl modified nucleotide with phosphorothioate linkage

SEQ ID NO: 1768 - RNA, 100 nt, synthetic construct; identical to SEQ ID NO: 367
  misc_feature 1..100: note = Description of Artificial Sequence: Synthetic polynucleotide
  source 1..100: mol_type = other RNA
  modified_base 1: mod_base = OTHER; note = 2'-O-methyl modified nucleotide with phosphorothioate linkage
  modified_base 2: mod_base = OTHER; note = 2'-O-methyl modified nucleotide with phosphorothioate linkage
  modified_base 3: mod_base = OTHER; note = 2'-O-methyl modified nucleotide with phosphorothioate linkage
  modified_base 97: mod_base = OTHER; note = 2'-O-methyl modified nucleotide with phosphorothioate linkage
  modified_base 98: mod_base = OTHER; note = 2'-O-methyl modified nucleotide with phosphorothioate linkage
  modified_base 99: mod_base = OTHER; note = 2'-O-methyl modified nucleotide with phosphorothioate linkage

SEQ ID NO: 1769 - RNA, 100 nt, synthetic construct; identical to SEQ ID NO: 371
  misc_feature 1..100: note = Description of Artificial Sequence: Synthetic polynucleotide
  source 1..100: mol_type = other RNA
  modified_base 1: mod_base = OTHER; note = 2'-O-methyl modified nucleotide with phosphorothioate linkage
  modified_base 2: mod_base = OTHER; note = 2'-O-methyl modified nucleotide with phosphorothioate linkage
  modified_base 3: mod_base = OTHER; note = 2'-O-methyl modified nucleotide with phosphorothioate linkage
  modified_base 97: mod_base = OTHER; note = 2'-O-methyl modified nucleotide with phosphorothioate linkage
  modified_base 98: mod_base = OTHER; note = 2'-O-methyl modified nucleotide with phosphorothioate linkage
  modified_base 99: mod_base = OTHER; note = 2'-O-methyl modified nucleotide with phosphorothioate linkage

SEQ ID NO: 1770 - RNA, 100 nt, synthetic construct; identical to SEQ ID NO: 375
  misc_feature 1..100: note = Description of Artificial Sequence: Synthetic polynucleotide
  source 1..100: mol_type = other RNA
  modified_base 1: mod_base = OTHER; note = 2'-O-methyl modified nucleotide with phosphorothioate linkage
  modified_base 2: mod_base = OTHER; note = 2'-O-methyl modified nucleotide with phosphorothioate linkage
  modified_base 3: mod_base = OTHER; note = 2'-O-methyl modified nucleotide with phosphorothioate linkage
  modified_base 97: mod_base = OTHER; note = 2'-O-methyl modified nucleotide with phosphorothioate linkage
  modified_base 98: mod_base = OTHER; note = 2'-O-methyl modified nucleotide with phosphorothioate linkage
  modified_base 99: mod_base = OTHER; note = 2'-O-methyl modified nucleotide with phosphorothioate linkage

SEQ ID NO: 1771 - RNA, 100 nt, synthetic construct; identical to SEQ ID NO: 379
  misc_feature 1..100: note = Description of Artificial Sequence: Synthetic polynucleotide
  source 1..100: mol_type = other RNA
  modified_base 1: mod_base = OTHER; note = 2'-O-methyl modified nucleotide with phosphorothioate linkage
  modified_base 2: mod_base = OTHER; note = 2'-O-methyl modified nucleotide with phosphorothioate linkage
  modified_base 3: mod_base = OTHER; note = 2'-O-methyl modified nucleotide with phosphorothioate linkage
  modified_base 97: mod_base = OTHER; note = 2'-O-methyl modified nucleotide with phosphorothioate linkage
  modified_base 98: mod_base = OTHER; note = 2'-O-methyl modified nucleotide with phosphorothioate linkage
  modified_base 99: mod_base = OTHER; note = 2'-O-methyl modified nucleotide with phosphorothioate linkage

SEQ ID NO: 1772 - RNA, 100 nt, synthetic construct; identical to SEQ ID NO: 383
  misc_feature 1..100: note = Description of Artificial Sequence: Synthetic polynucleotide
  source 1..100: mol_type = other RNA
  modified_base 1: mod_base = OTHER; note = 2'-O-methyl modified nucleotide with phosphorothioate linkage
  modified_base 2: mod_base = OTHER; note = 2'-O-methyl modified nucleotide with phosphorothioate linkage
  modified_base 3: mod_base = OTHER; note = 2'-O-methyl modified nucleotide with phosphorothioate linkage
  modified_base 97: mod_base = OTHER; note = 2'-O-methyl modified nucleotide with phosphorothioate linkage
  modified_base 98: mod_base = OTHER; note = 2'-O-methyl modified nucleotide with phosphorothioate linkage
  modified_base 99: mod_base = OTHER; note = 2'-O-methyl modified nucleotide with phosphorothioate linkage

SEQ ID NO: 1773 - RNA, 100 nt, synthetic construct; identical to SEQ ID NO: 387
  misc_feature 1..100: note = Description of Artificial Sequence: Synthetic polynucleotide
  source 1..100: mol_type = other RNA
  modified_base 1: mod_base = OTHER; note = 2'-O-methyl modified nucleotide with phosphorothioate linkage
  modified_base 2: mod_base = OTHER; note = 2'-O-methyl modified nucleotide with phosphorothioate linkage
  modified_base 3: mod_base = OTHER; note = 2'-O-methyl modified nucleotide with phosphorothioate linkage
  modified_base 97: mod_base = OTHER; note = 2'-O-methyl modified nucleotide with phosphorothioate linkage
  modified_base 98: mod_base = OTHER; note = 2'-O-methyl modified nucleotide with phosphorothioate linkage
  modified_base 99: mod_base = OTHER; note = 2'-O-methyl modified nucleotide with phosphorothioate linkage

SEQ ID NO: 1774 - RNA, 100 nt, synthetic construct; identical to SEQ ID NO: 391
  misc_feature 1..100: note = Description of Artificial Sequence: Synthetic polynucleotide
  source 1..100: mol_type = other RNA
  modified_base 1: mod_base = OTHER; note = 2'-O-methyl modified nucleotide with phosphorothioate linkage
  modified_base 2: mod_base = OTHER; note = 2'-O-methyl modified nucleotide with phosphorothioate linkage
  modified_base 3: mod_base = OTHER; note = 2'-O-methyl modified nucleotide with phosphorothioate linkage
  modified_base 97: mod_base = OTHER; note = 2'-O-methyl modified nucleotide with phosphorothioate linkage
  modified_base 98: mod_base = OTHER; note = 2'-O-methyl modified nucleotide with phosphorothioate linkage
  modified_base 99: mod_base = OTHER; note = 2'-O-methyl modified nucleotide with phosphorothioate linkage

SEQ ID NO: 1775 - RNA, 100 nt, synthetic construct; identical to SEQ ID NO: 395
  misc_feature 1..100: note = Description of Artificial Sequence: Synthetic polynucleotide
  source 1..100: mol_type = other RNA
  modified_base 1: mod_base = OTHER; note = 2'-O-methyl modified nucleotide with phosphorothioate linkage
  modified_base 2: mod_base = OTHER; note = 2'-O-methyl modified nucleotide with phosphorothioate linkage
  modified_base 3: mod_base = OTHER; note = 2'-O-methyl modified nucleotide with phosphorothioate linkage
  modified_base 97: mod_base = OTHER; note = 2'-O-methyl modified nucleotide with phosphorothioate linkage
  modified_base 98: mod_base = OTHER; note = 2'-O-methyl modified nucleotide with phosphorothioate linkage
  modified_base 99: mod_base = OTHER; note = 2'-O-methyl modified nucleotide with phosphorothioate linkage

SEQ ID NO: 1776-1999 - skipped (224 entries)

SEQ ID NO: 2000 - DNA, 110 bp, synthetic construct
  misc_feature 1..110: note = Description of Artificial Sequence: Synthetic polynucleotide
  source 1..110: mol_type = other DNA
gtgccagatgaacttcccatgtttaagagctatgctggaaacagcatagcaagtttaaataaggctagtccgttatcaacttgaaaaagtggcaccgagtcggtgctttt

SEQ ID NO: 2001 - DNA, 25 bp, synthetic construct
  misc_feature 1..25: note = Description of Artificial Sequence: Synthetic primer
  source 1..25: mol_type = other DNA
agctccaaactctcaaaccacaggg

SEQ ID NO: 2002 - DNA, 25 bp, synthetic construct
  misc_feature 1..25: note = Description of Artificial Sequence: Synthetic primer
  source 1..25: mol_type = other DNA
tacaattttgggagtccacacggca

SEQ ID NO: 2003 - RNA, 36 nt, synthetic construct
  misc_feature 1..36: note = Description of Artificial Sequence: Synthetic oligonucleotide
  misc_difference 1..20: note = modified_base - a, c, u, g, unknown or other
  source 1..36: mol_type = other RNA
nnnnnnnnnnnnnnnnnnnngttttagagctatgct

SEQ ID NO: 2004 - RNA, 36 nt, synthetic construct; identical to SEQ ID NO: 2003
  misc_feature 1..36: note = Description of Artificial Sequence: Synthetic oligonucleotide
  misc_difference 1..20: note = modified_base - a, c, u, g, unknown or other
  source 1..36: mol_type = other RNA

SEQ ID NO: 2005 - protein, 835 aa, Homo sapiens
MSRRKQGKPQHLSKREFSPEPLEAILTDDEPDHGPLGAPEGDHDLLTCGQCQMNFPLGDILIFIEHKRKQCNGSLCLEKAVDKPPSPSPIEMKKASNPVEVGIQVTPEDDDCLSTSSRGICPKQEHIADKLLHWRGLSSPRSAHGALIPTPGMSAEYAPQGICKDEPSSYTCTTCKQPFTSAWFLLQHAQNTHGLRIYLESEHGSPLTPRVGIPSGLGAECPSQPPLHGIHIADNNPFNLLRIPGSVSREASGLAEGRFPPTPPLFSPPPRHHLDPHRIERLGAEEMALATHHPSAFDRVLRLNPMAMEPPAMDFSRRLRELAGNTSSPPLSPGRPSPMQRLLQPFQPGSKPPFLATPPLPPLQSAPPPSQPPVKSKSCEFCGKTFKFQSNLVVHRRSHTGEKPYKCNLCDHACTQASKLKRHMKTHMHKSSPMTVKSDDGLSTASSPEPGTSDLVGSASSALKSVVAKFKSENDPNLIPENGDEEEEEDDEEEEEEEEEEEEELTESERVDYGFGLSLEAARHHENSSRGAVVGVGDESRALPDVMQGMVLSSMQHFSEAFHQVLGEKHKRGHLAEAEGHRDTCDEDSVAGESDRIDDGTVNGRGCSPGESASGGLSKKLLLGSPSSLSPFSKRIKLEKEFDLPPAAMPNTENVYSQWLAGYAASRQLKDPFLSFGDSRQSPFASSSEHSSENGSLRFSTPPGELDGGISGRSGTGSGGSTPHISGPGPGRPSSKEGRRSDTCEYCGKVFKNCSNLTVHRRSHTGERPYKCELCNYACAQSSKLTRHMKTHGQVGKDVYKCEICKMPFSVYSTLEKHMKKWHSDRVLNNDIKTE

SEQ ID NO: 2006 - RNA, 10 nt, synthetic construct
  misc_feature 1..10: note = Description of Artificial Sequence: Synthetic oligonucleotide
  misc_difference 1..10: note = misc_feature - This sequence may encompass 1-10 nucleotides
  source 1..10: mol_type = other RNA
tttttttttt

SEQ ID NO: 2007 - RNA, 10 nt, synthetic construct
  misc_feature 1..10: note = Description of Artificial Sequence: Synthetic oligonucleotide
  misc_difference 1..10: note = misc_feature - This sequence may encompass 1-10 nucleotides
  source 1..10: mol_type = other RNA
aaaaaaaaaa

SEQ ID NO: 2008 - RNA, 36 nt, synthetic construct; identical to SEQ ID NO: 2003
  misc_feature 1..36: note = Description of Artificial Sequence: Synthetic oligonucleotide
  misc_difference 1..20: note = modified_base - a, c, u, g, unknown or other
  source 1..36: mol_type = other RNA

SEQ ID NO: 2009 - RNA, 36 nt, synthetic construct; identical to SEQ ID NO: 2003
  misc_feature 1..36: note = Description of Artificial Sequence: Synthetic oligonucleotide
  misc_difference 1..20: note = modified_base - a, c, u, g, unknown or other
  source 1..36: mol_type = other RNA

SEQ ID NO: 2010 - RNA, 42 nt, synthetic construct
  misc_feature 1..42: note = Description of Artificial Sequence: Synthetic oligonucleotide
  misc_difference 1..20: note = modified_base - a, c, u, g, unknown or other
  source 1..42: mol_type = other RNA
nnnnnnnnnnnnnnnnnnnngttttagagctatgctgttttg

SEQ ID NO: 2011 - RNA, 42 nt, synthetic construct; identical to SEQ ID NO: 2010
  misc_feature 1..42: note = Description of Artificial Sequence: Synthetic oligonucleotide
  misc_difference 1..20: note = modified_base - a, c, u, g, unknown or other
  source 1..42: mol_type = other RNA

SEQ ID NO: 2012 - RNA, 42 nt, synthetic construct; identical to SEQ ID NO: 2010
  misc_feature 1..42: note = Description of Artificial Sequence: Synthetic oligonucleotide
  misc_difference 1..20: note = modified_base - a, c, u, g, unknown or other
  source 1..42: mol_type = other RNA

SEQ ID NO: 2013 - RNA, 100 nt, synthetic construct
  misc_feature 1..100: note = Description of Artificial Sequence: Synthetic polynucleotide
  misc_difference 1..20: note = modified_base - a, c, u, g, unknown or other
  source 1..100: mol_type = other RNA
nnnnnnnnnnnnnnnnnnnngttttagagctagaaatagcaagttaaaataaggctagtccgttatcaacttgaaaaagtggcaccgagtcggtgctttt

SEQ ID NO: 2014 - RNA, 100 nt, synthetic construct; identical to SEQ ID NO: 2013
  misc_feature 1..100: note = Description of Artificial Sequence: Synthetic polynucleotide
  misc_difference 1..20: note = modified_base - a, c, u, g, unknown or other
  source 1..100: mol_type = other RNA

SEQ ID NO: 2015 - RNA, 100 nt, synthetic construct; identical to SEQ ID NO: 2013
  misc_feature 1..100: note = Description of Artificial Sequence: Synthetic polynucleotide
  misc_difference 1..20: note = modified_base - a, c, u, g, unknown or other
  source 1..100: mol_type = other RNA

SEQ ID NO: 2016 - RNA, 20 nt, synthetic construct
  misc_feature 1..20: note = Description of Artificial Sequence: Synthetic oligonucleotide
  source 1..20: mol_type = other RNA
gtgccagatgaacttcccat

SEQ ID NO: 2017 - RNA, 20 nt, synthetic construct
  misc_feature 1..20: note = Description of Artificial Sequence: Synthetic oligonucleotide
  source 1..20: mol_type = other RNA
cacaaacggaaacaatgcaa

SEQ ID NO: 2018 - DNA, 21 bp, synthetic construct
  misc_feature 1..21: note = Description of Artificial Sequence: Synthetic primer
  source 1..21: mol_type = other DNA
gcttggctacagcacctctga

SEQ ID NO: 2019 - DNA, 21 bp, synthetic construct
  misc_feature 1..21: note = Description of Artificial Sequence: Synthetic primer
  source 1..21: mol_type = other DNA
ggcatggggttgagatgtgct

SEQ ID NO: 2020 - DNA, 20 bp, Homo sapiens
  source 1..20: mol_type = unassigned DNA
tcagtgagatgagatatcaa

SEQ ID NO: 2021 - DNA, 20 bp, Homo sapiens
  source 1..20: mol_type = unassigned DNA
cagtgagatgagatatcaaa

SEQ ID NO: 2022 - DNA, 20 bp, Homo sapiens
  source 1..20: mol_type = unassigned DNA
tgtaactaataaataccagg

SEQ ID NO: 2023 - DNA, 20 bp, Homo sapiens
  source 1..20: mol_type = unassigned DNA
ttagggtgggggcgtgggtg

SEQ ID NO: 2024 - DNA, 20 bp, Homo sapiens
  source 1..20: mol_type = unassigned DNA
attagggtgggggcgtgggt

SEQ ID NO: 2025 - DNA, 20 bp, Homo sapiens
  source 1..20: mol_type = unassigned DNA
cacgcccccaccctaatcag

SEQ ID NO: 2026 - DNA, 20 bp, Homo sapiens
  source 1..20: mol_type = unassigned DNA
tctgattagggtgggggcgt

SEQ ID NO: 2027 - DNA, 20 bp, Homo sapiens
  source 1..20: mol_type = unassigned DNA
ttggcctctgattagggtgg

SEQ ID NO: 2028 - DNA, 20 bp, Homo sapiens
  source 1..20: mol_type = unassigned DNA
tttggcctctgattagggtg

SEQ ID NO: 2029 - DNA, 20 bp, Homo sapiens
  source 1..20: mol_type = unassigned DNA
gtttggcctctgattagggt

SEQ ID NO: 2030 - DNA, 20 bp, Homo sapiens
  source 1..20: mol_type = unassigned DNA
ggtttggcctctgattaggg

SEQ ID NO: 2031 - DNA, 20 bp, Homo sapiens
  source 1..20: mol_type = unassigned DNA
aagggtttggcctctgatta

SEQ ID NO: 2032 - DNA, 20 bp, Homo sapiens
  source 1..20: mol_type = unassigned DNA
gaagggtttggcctctgatt

SEQ ID NO: 2033 - DNA, 20 bp, Homo sapiens
  source 1..20: mol_type = unassigned DNA
atcagaggccaaacccttcc

SEQ ID NO: 2034 - DNA, 20 bp, Homo sapiens
  source 1..20: mol_type = unassigned DNA
cacaggctccaggaagggtt

SEQ ID NO: 2035 - DNA, 20 bp, Homo sapiens
  source 1..20: mol_type = unassigned DNA
tttatcacaggctccaggaa

SEQ ID NO: 2036 - DNA, 20 bp, Homo sapiens
  source 1..20: mol_type = unassigned DNA
ttttatcacaggctccagga

SEQ ID NO: 2037 - DNA, 20 bp, Homo sapiens
  source 1..20: mol_type = unassigned DNA
ttgcttttatcacaggctcc

SEQ ID NO: 2038 - DNA, 20 bp, Homo sapiens
  source 1..20: mol_type = unassigned DNA
ctaacagttgcttttatcac

SEQ ID NO: 2039 - DNA, 23 bp, synthetic construct
  misc_feature 1..23: note = Description of Artificial Sequence: Synthetic oligonucleotide
  source 1..23: mol_type = other DNA
ctaacagttgcttttatcacagg

SEQ ID NO: 2040 - DNA, 45 bp, synthetic construct
  misc_feature 1..45: note = Description of Artificial Sequence: Synthetic oligonucleotide
  source 1..45: mol_type = other DNA
tagtgcaagctaacaggctccaggaagggtttggcctctgattag

SEQ ID NO: 2041 - DNA, 61 bp, synthetic construct
  misc_feature 1..61: note = Description of Artificial Sequence: Synthetic oligonucleotide
  source 1..61: mol_type = other DNA
tagtgcaagctaacagttgcttttattcacaggctccaggaagggtttggcctctgattag

SEQ ID NO: 2042 - DNA, 47 bp, synthetic construct
  misc_feature 1..47: note = Description of Artificial Sequence: Synthetic oligonucleotide
  source 1..47: mol_type = other DNA
tagtgcaagctaacagttgctccaggaagggtttggcctctgattag

SEQ ID NO: 2043 - DNA, 58 bp, synthetic construct
  misc_feature 1..58: note = Description of Artificial Sequence: Synthetic oligonucleotide
  source 1..58: mol_type = other DNA
tagtgcaagctaacagttgcttttatcaggctccaggaagggtttggcctctgattag

SEQ ID NO: 2044 - DNA, 59 bp, synthetic construct
  misc_feature 1..59: note = Description of Artificial Sequence: Synthetic oligonucleotide
  source 1..59: mol_type = other DNA
tagtgcaagctaacagttgcttttacacaggctccaggaagggtttggcctctgattag

SEQ ID NO: 2045 - DNA, 58 bp, synthetic construct
  misc_feature 1..58: note = Description of Artificial Sequence: Synthetic oligonucleotide
  source 1..58: mol_type = other DNA
tagtgcaagctaacagttgcttttcacaggctccaggaagggtttggcctctgattag

SEQ ID NO: 2046 - DNA, 37 bp, synthetic construct
  misc_feature 1..37: note = Description of Artificial Sequence: Synthetic oligonucleotide
  source 1..37: mol_type = other DNA
tagtgcaagctccaggaagggtttggcctctgattag

SEQ ID NO: 2047 - DNA, 23 bp, synthetic construct
  misc_feature 1..23: note = Description of Artificial Sequence: Synthetic oligonucleotide
  source 1..23: mol_type = other DNA
atcagaggccaaacccttccacc

SEQ ID NO: 2048 - DNA, 59 bp, synthetic construct
  misc_feature 1..59: note = Description of Artificial Sequence: Synthetic oligonucleotide
  source 1..59: mol_type = other DNA
agctaacagttgcttttatcacaggctccaggagggtttggcctctgattagggtgggg

SEQ ID NO: 2049 - DNA, 55 bp, synthetic construct
  misc_feature 1..55: note = Description of Artificial Sequence: Synthetic oligonucleotide
  source 1..55: mol_type = other DNA
agctaacagttgcttttatcacaggctccaggtttggcctctgattagggtgggg

SEQ ID NO: 2050 - DNA, 61 bp, synthetic construct
  misc_feature 1..61: note = Description of Artificial Sequence: Synthetic oligonucleotide
  source 1..61: mol_type = other DNA
agctaacagttgcttttatcacaggctccaggaaagggtttggcctctgattagggtgggg

SEQ ID NO: 2051 - DNA, 56 bp, synthetic construct
  misc_feature 1..56: note = Description of Artificial Sequence: Synthetic oligonucleotide
  source 1..56: mol_type = other DNA
agctaacagttgcttttatcacaggctccagggtttggcctctgattagggtgggg

SEQ ID NO: 2052 - DNA, 58 bp, synthetic construct
  misc_feature 1..58: note = Description of Artificial Sequence: Synthetic oligonucleotide
  source 1..58: mol_type = other DNA
agctaacagttgcttttatcacaggctccaggaggtttggcctctgattagggtgggg

SEQ ID NO: 2053 - DNA, 59 bp, synthetic construct; identical to SEQ ID NO: 2048
  misc_feature 1..59: note = Description of Artificial Sequence: Synthetic oligonucleotide
  source 1..59: mol_type = other DNA

SEQ ID NO: 2054 - DNA, 59 bp, synthetic construct
  misc_feature 1..59: note = Description of Artificial Sequence: Synthetic oligonucleotide
  source 1..59: mol_type = other DNA
agctaacagttgcttttatcacaggctccaggaaggtttggcctctgattagggtgggg

SEQ ID NO: 2055 - DNA, 61 bp, synthetic construct; identical to SEQ ID NO: 2050
  misc_feature 1..61: note = Description of Artificial Sequence: Synthetic oligonucleotide
  source 1..61: mol_type = other DNA

SEQ ID NO: 2056 - DNA, 58 bp, synthetic construct; identical to SEQ ID NO: 2052
  misc_feature 1..58: note = Description of Artificial Sequence: Synthetic oligonucleotide
  source 1..58: mol_type = other DNA

SEQ ID NO: 2057 - DNA, 58 bp, synthetic construct
  misc_feature 1..58: note = Description of Artificial Sequence: Synthetic oligonucleotide
  source 1..58: mol_type = other DNA
agctaacagttgcttttatcacaggctccaggaagtttggcctctgattagggtgggg

SEQ ID NO: 2058 - DNA, 50 bp, synthetic construct
  misc_feature 1..50: note = Description of Artificial Sequence: Synthetic oligonucleotide
  source 1..50: mol_type = other DNA
agctaacagttgcttttatcacaggctccaggcctctgattagggtgggg

SEQ ID NO: 2059 - DNA, 43 bp, synthetic construct
  misc_feature 1..43: note = Description of Artificial Sequence: Synthetic oligonucleotide
  source 1..43: mol_type = other DNA
agctaacagttgcttttatcacaggcctctgattagggtgggg

SEQ ID NO: 2060 - DNA, 57 bp, synthetic construct
  misc_feature 1..57: note = Description of Artificial Sequence: Synthetic oligonucleotide
  source 1..57: mol_type = other DNA
agctaacagttgcttttatcacaggctccaggagtttggcctctgattagggtgggg

SEQ ID NO: 2061 - DNA, 23 bp, synthetic construct
  misc_feature 1..23: note = Description of Artificial Sequence: Synthetic oligonucleotide
  source 1..23: mol_type = other DNA
ttgcttttatcacaggctccagg

SEQ ID NO: 2062 - DNA, 53 bp, synthetic construct
  misc_feature 1..53: note = Description of Artificial Sequence: Synthetic oligonucleotide
  source 1..53: mol_type = other DNA
agctaacagttgcttttatcacaggaagggtttggcctctgattagggtgggg

SEQ ID NO: 2063 - DNA, 61 bp, synthetic construct
  misc_feature 1..61: note = Description of Artificial Sequence: Synthetic oligonucleotide
  source 1..61: mol_type = other DNA
agctaacagttgcttttatcacaggcttccaggaagggtttggcctctgattagggtgggg

SEQ ID NO: 2064 - DNA, 52 bp, synthetic construct
  misc_feature 1..52: note = Description of Artificial Sequence: Synthetic oligonucleotide
  source 1..52: mol_type = other DNA
agctaacagttgcttttatccaggaagggtttggcctctgattagggtgggg

SEQ ID NO: 2065 - DNA, 61 bp, synthetic construct
  misc_feature 1..61: note = Description of Artificial Sequence: Synthetic oligonucleotide
  source 1..61: mol_type = other DNA
agctaacagttgcttttatcacaggcctccaggaagggtttggcctctgattagggtgggg

SEQ ID NO: 2066 - DNA, 59 bp, synthetic construct
  misc_feature 1..59: note = Description of Artificial Sequence: Synthetic oligonucleotide
  source 1..59: mol_type = other DNA
agctaacagttgcttttatcacaggcccaggaagggtttggcctctgattagggtgggg

SEQ ID NO: 2067 - DNA, 58 bp, synthetic construct
  misc_feature 1..58: note = Description of Artificial Sequence: Synthetic oligonucleotide
  source 1..58: mol_type = other DNA
agctaacagttgcttttatcacaggccaggaagggtttggcctctgattagggtgggg

SEQ ID NO: 2068 - DNA, 53 bp, synthetic construct; identical to SEQ ID NO: 2062
  misc_feature 1..53: note = Description of Artificial Sequence: Synthetic oligonucleotide
  source 1..53: mol_type = other DNA

SEQ ID NO: 2069 - DNA, 61 bp, synthetic construct; identical to SEQ ID NO: 2063
  misc_feature 1..61: note = Description of Artificial Sequence: Synthetic oligonucleotide
  source 1..61: mol_type = other DNA

SEQ ID NO: 2070 - DNA, 52 bp, synthetic construct; identical to SEQ ID NO: 2064
  misc_feature 1..52: note = Description of Artificial Sequence: Synthetic oligonucleotide
  source 1..52: mol_type = other DNA

SEQ ID NO: 2071 - DNA, 61 bp, synthetic construct; identical to SEQ ID NO: 2065
  misc_feature 1..61: note = Description of Artificial Sequence: Synthetic oligonucleotide
  source 1..61: mol_type = other DNA

SEQ ID NO: 2072 - DNA, 53 bp, synthetic construct; identical to SEQ ID NO: 2062
  misc_feature 1..53: note = Description of Artificial Sequence: Synthetic oligonucleotide
  source 1..53: mol_type = other DNA

SEQ ID NO: 2073 - DNA, 52 bp, synthetic construct; identical to SEQ ID NO: 2064
  misc_feature 1..52: note = Description of Artificial Sequence: Synthetic oligonucleotide
  source 1..52: mol_type = other DNA

SEQ ID NO: 2074 - DNA, 61 bp, synthetic construct; identical to SEQ ID NO: 2063
  misc_feature 1..61: note = Description of Artificial Sequence: Synthetic oligonucleotide
  source 1..61: mol_type = other DNA

SEQ ID NO: 2075 - DNA, 23 bp, synthetic construct
  misc_feature 1..23: note = Description of Artificial Sequence: Synthetic oligonucleotide
  source 1..23: mol_type = other DNA
agctaacagtgattagggtgggg

SEQ ID NO: 2076 - DNA, 59 bp, synthetic construct; identical to SEQ ID NO: 2066
  misc_feature 1..59: note = Description of Artificial Sequence: Synthetic oligonucleotide
  source 1..59: mol_type = other DNA

SEQ ID NO: 2077 - DNA, 53 bp, synthetic construct; identical to SEQ ID NO: 2062
  misc_feature 1..53: note = Description of Artificial Sequence: Synthetic oligonucleotide
  source 1..53: mol_type = other DNA

SEQ ID NO: 2078 - DNA, 52 bp, synthetic construct; identical to SEQ ID NO: 2064
  misc_feature 1..52: note = Description of Artificial Sequence: Synthetic oligonucleotide
  source 1..52: mol_type = other DNA

SEQ ID NO: 2079 - DNA, 61 bp, synthetic construct; identical to SEQ ID NO: 2063
  misc_feature 1..61: note = Description of Artificial Sequence: Synthetic oligonucleotide
  source 1..61: mol_type = other DNA

SEQ ID NO: 2080 - DNA, 61 bp, synthetic construct; identical to SEQ ID NO: 2065
  misc_feature 1..61: note = Description of Artificial Sequence: Synthetic oligonucleotide
  source 1..61: mol_type = other DNA

SEQ ID NO: 2081 - DNA, 55 bp, synthetic construct
  misc_feature 1..55: note = Description of Artificial Sequence: Synthetic oligonucleotide
  source 1..55: mol_type = other DNA
agctaacagttgcttttatcacaggcgaagggtttggcctctgattagggtgggg

SEQ ID NO: 2082 - DNA, 23 bp, synthetic construct
  misc_feature 1..23: note = Description of Artificial Sequence: Synthetic oligonucleotide
  source 1..23: mol_type = other DNA
ttttatcacaggctccaggaagg

SEQ ID NO: 2083 - DNA, 61 bp, synthetic construct
  misc_feature 1..61: note = Description of Artificial Sequence: Synthetic oligonucleotide
  source 1..61: mol_type = other DNA
aacagttgcttttatcacaggctccaaggaagggtttggcctctgattagggtgggggcgt

SEQ ID NO: 2084 - DNA, 43 bp, synthetic construct
  misc_feature 1..43: note = Description of Artificial Sequence: Synthetic oligonucleotide
  source 1..43: mol_type = other DNA
aacagttgcttttatcacaggcctctgattagggtgggggcgt

SEQ ID NO: 2085 - DNA, 49 bp, synthetic construct
  misc_feature 1..49: note = Description of Artificial Sequence: Synthetic oligonucleotide
  source 1..49: mol_type = other DNA
aacagttgcttttatcacagggtttggcctctgattagggtgggggcgt

SEQ ID NO: 2086 - DNA, 53 bp, synthetic construct
  misc_feature 1..53: note = Description of Artificial Sequence: Synthetic oligonucleotide
  source 1..53: mol_type = other DNA
aacagttgcttttatcacaggaagggtttggcctctgattagggtgggggcgt

SEQ ID NO: 2087 - DNA, 24 bp, synthetic construct
  misc_feature 1..24: note = Description of Artificial Sequence: Synthetic oligonucleotide
  source 1..24: mol_type = other DNA
aacagttgcttttggtgggggcgt

SEQ ID NO: 2088 - DNA, 61 bp, synthetic construct; identical to SEQ ID NO: 2083
  misc_feature 1..61: note = Description of Artificial Sequence: Synthetic oligonucleotide
  source 1..61: mol_type = other DNA

SEQ ID NO: 2089 - DNA, 49 bp, synthetic construct; identical to SEQ ID NO: 2085
  misc_feature 1..49: note = Description of Artificial Sequence: Synthetic oligonucleotide
  source 1..49: mol_type = other DNA

SEQ ID NO: 2090 - DNA, 53 bp, synthetic construct; identical to SEQ ID NO: 2086
  misc_feature 1..53: note = Description of Artificial Sequence: Synthetic oligonucleotide
  source 1..53: mol_type = other DNA

SEQ ID NO: 2091 - DNA, 43 bp, synthetic construct; identical to SEQ ID NO: 2084
  misc_feature 1..43: note = Description of Artificial Sequence: Synthetic oligonucleotide
  source 1..43: mol_type = other DNA

SEQ ID NO: 2092 - DNA, 48 bp, synthetic construct
  misc_feature 1..48: note = Description of Artificial Sequence: Synthetic oligonucleotide
  source 1..48: mol_type = other DNA
aacagttgcttttatcacaggcttggcctctgattagggtgggggcgt

SEQ ID NO: 2093 - DNA, 59 bp, synthetic construct
  misc_feature 1..59: note = Description of Artificial Sequence: Synthetic oligonucleotide
  source 1..59: mol_type = other DNA
aacagttgcttttatcacaggctccggaagggtttggcctctgattagggtgggggcgt

SEQ ID NO: 2094 - DNA, 23 bp, synthetic construct
  misc_feature 1..23: note = Description of Artificial Sequence: Synthetic oligonucleotide
  source 1..23: mol_type = other DNA
tttatcacaggctccaggaaggg

SEQ ID NO: 2095 - DNA, 59 bp, synthetic construct
  misc_feature 1..59: note = Description of Artificial Sequence: Synthetic oligonucleotide
  source 1..59: mol_type = other DNA
acagttgcttttatcacaggctccagaagggtttggcctctgattagggtgggggcgtg

SEQ ID NO: 2096 - DNA, 49 bp, synthetic construct
  misc_feature 1..49: note = Description of Artificial Sequence: Synthetic oligonucleotide
  source 1..49: mol_type = other DNA
acagttgcttttatcacagggtttggcctctgattagggtgggggcgtg

SEQ ID NO: 2097 - DNA, 61 bp, synthetic construct
  misc_feature 1..61: note = Description of Artificial Sequence: Synthetic oligonucleotide
  source 1..61: mol_type = other DNA
acagttgcttttatcacaggctccagggaagggtttggcctctgattagggtgggggcgtg

SEQ ID NO: 2098 - DNA, 43 bp, synthetic construct
  misc_feature 1..43: note = Description of Artificial Sequence: Synthetic oligonucleotide
  source 1..43: mol_type = other DNA
acagttgcttttatcacaggcctctgattagggtgggggcgtg

SEQ ID NO: 2099 - DNA, 21 bp, synthetic construct
  misc_feature 1..21: note = Description of Artificial Sequence: Synthetic oligonucleotide
  source 1..21: mol_type = other DNA
acagttgcttttgggggcgtg

SEQ ID NO: 2100 - DNA, 20 bp, synthetic construct
  misc_feature 1..20: note = Description of Artificial Sequence: Synthetic oligonucleotide
  source 1..20: mol_type = other DNA
acagttgctttgggggcgtg

SEQ ID NO: 2101 - DNA, 59 bp, synthetic construct; identical to SEQ ID NO: 2095
  misc_feature 1..59: note = Description of Artificial Sequence: Synthetic oligonucleotide
  source 1..59: mol_type = other DNA

SEQ ID NO: 2102 - DNA, 49 bp, synthetic construct; identical to SEQ ID NO: 2096
  misc_feature 1..49: note = Description of Artificial Sequence: Synthetic oligonucleotide
  source 1..49: mol_type = other DNA

SEQ ID NO: 2103 - DNA, 61 bp, synthetic construct; identical to SEQ ID NO: 2097
  misc_feature 1..61: note = Description of Artificial Sequence: Synthetic oligonucleotide
  source 1..61: mol_type = other DNA

SEQ ID NO: 2104 - DNA, 42 bp, synthetic construct
  misc_feature 1..42: note = Description of Artificial Sequence: Synthetic oligonucleotide
  source 1..42: mol_type = other DNA
acagttgcttttatcacaggctccagataaggtgggggcgtg

SEQ ID NO: 2105 - DNA, 43 bp, synthetic construct; identical to SEQ ID NO: 2098
  misc_feature 1..43: note = Description of Artificial Sequence: Synthetic oligonucleotide
  source 1..43: mol_type = other DNA

SEQ ID NO: 2106 - DNA, 56 bp, synthetic construct
  misc_feature 1..56: note = Description of Artificial Sequence: Synthetic oligonucleotide
  source 1..56: mol_type = other DNA
acagttgcttttatcacaggctccagggtttggcctctgattagggtgggggcgtg

SEQ ID NO: 2107 - DNA, 61 bp, synthetic construct
  misc_feature 1..61: note = Description of Artificial Sequence: Synthetic oligonucleotide
  source 1..61: mol_type = other DNA
acagttgcttttatcacaggctccagcgaagggtttggcctctgattagggtgggggcgtg

SEQ ID NO: 2108 - DNA, 59 bp, synthetic construct
  misc_feature 1..59: note = Description of Artificial Sequence: Synthetic oligonucleotide
  source 1..59: mol_type = other DNA
acagttgcttttatcacaggctccggaagggtttggcctctgattagggtgggggcgtg

SEQ ID NO: 2109 - DNA, 23 bp, synthetic construct
  misc_feature 1..23: note = Description of Artificial Sequence: Synthetic oligonucleotide
  source 1..23: mol_type = other DNA
cacaggctccaggaagggtttgg

SEQ ID NO: 2110 - DNA, 59 bp, synthetic construct
  misc_feature 1..59: note = Description of Artificial Sequence: Synthetic oligonucleotide
  source 1..59: mol_type = other DNA
tgcttttatcacaggctccaggaaggtttggcctctgattagggtgggggcgtgggtgg

SEQ ID NO: 2111 - DNA, 31 bp, synthetic construct
  misc_feature 1..31: note = Description of Artificial Sequence: Synthetic oligonucleotide
  source 1..31: mol_type = other DNA
tgcttttatcacaggcctggggcgtgggtgg

SEQ ID NO: 2112 - DNA, 24 bp, synthetic construct
  misc_feature 1..24: note = Description of Artificial Sequence: Synthetic oligonucleotide
  source 1..24: mol_type = other DNA
tgcttttatcacaggcgtgggtgg

SEQ ID NO: 2113 - DNA, 43 bp, synthetic construct
  misc_feature 1..43: note = Description of Artificial Sequence: Synthetic oligonucleotide
  source 1..43: mol_type = other DNA
tgcttttatcacaggcctctgattagggtgggggcgtgggtgg

SEQ ID NO: 2114 - DNA, 54 bp, synthetic construct
  misc_feature 1..54: note = Description of Artificial Sequence: Synthetic oligonucleotide
  source 1..54: mol_type = other DNA
tgcttttatcacaggctccaggaaggcctctgattagggtgggggcgtgggtgg

SEQ ID NO: 2115 - DNA, 59 bp, synthetic construct
  misc_feature 1..59: note = Description of Artificial Sequence: Synthetic oligonucleotide
  source 1..59: mol_type = other DNA
tgcttttatcacaggctccaggagggtttggcctctgattagggtgggggcgtgggtgg

SEQ ID NO: 2116 - DNA, 59 bp, synthetic construct; identical to SEQ ID NO: 2110
  misc_feature 1..59: note = Description of Artificial Sequence: Synthetic oligonucleotide
  source 1..59: mol_type = other DNA

SEQ ID NO: 2117 - DNA, 43 bp, synthetic construct; identical to SEQ ID NO: 2113
  misc_feature 1..43: note = Description of Artificial Sequence: Synthetic oligonucleotide
  source 1..43: mol_type = other DNA

SEQ ID NO: 2118 - DNA, 61 bp, synthetic construct
  misc_feature 1..61: note = Description of Artificial Sequence: Synthetic oligonucleotide
  source 1..61: mol_type = other DNA
tgcttttatcacaggctccaggaaagggtttggcctctgattagggtgggggcgtgggtgg

SEQ ID NO: 2119 - DNA, 32 bp, synthetic construct
  misc_feature 1..32: note = Description of Artificial Sequence: Synthetic oligonucleotide
  source 1..32: mol_type = other DNA
tgcttttatcacaggctccagggcgtgggtgg

SEQ ID NO: 2120 - DNA, 55 bp, synthetic construct
  misc_feature 1..55: note = Description of Artificial Sequence: Synthetic oligonucleotide
  source 1..55: mol_type = other DNA
tgcttttatcacaggctccaggtttggcctctgattagggtgggggcgtgggtgg

SEQ ID NO: 2121 - DNA, 24 bp, synthetic construct
  misc_feature 1..24: note = Description of Artificial Sequence: Synthetic oligonucleotide
  source 1..24: mol_type = other DNA
tgcttttatcacaggcgtgggtgg

SEQ ID NO: 2122 - DNA, 58 bp, synthetic construct
  misc_feature 1..58: note = Description of Artificial Sequence: Synthetic oligonucleotide
  source 1..58: mol_type = other DNA
tgcttttatcacaggctccaggaagtttggcctctgattagggtgggggcgtgggtgg

SEQ ID NO: 2123 - DNA, 43 bp, synthetic construct
  misc_feature 1..43: note = Description of Artificial Sequence: Synthetic oligonucleotide
  source 1..43: mol_type = other DNA
tgcttttatcacaggctccaggaaggtccgtttgcgtgggtgg

SEQ ID NO: 2124 - DNA, 23 bp, synthetic construct
  misc_feature 1..23: note = Description of Artificial Sequence: Synthetic oligonucleotide
  source 1..23: mol_type = other DNA
cacgcccccaccctaatcagagg

SEQ ID NO: 2125 - DNA, 41 bp, synthetic construct
  misc_feature 1..41: note = Description of Artificial Sequence: Synthetic oligonucleotide
  source 1..41: mol_type = other DNA
tatcacaggctccaggaagggtttggcgtgggtggggtaga

SEQ ID NO: 2126 - DNA, 61 bp, synthetic construct
  misc_feature 1..61: note = Description of Artificial Sequence: Synthetic oligonucleotide
  source 1..61: mol_type = other DNA
tatcacaggctccaggaagggtttggcctctgaattagggtgggggcgtgggtggggtaga

SEQ ID NO: 2127 - DNA, 36 bp, synthetic construct
  misc_feature 1..36: note = Description of Artificial Sequence: Synthetic oligonucleotide
  source 1..36: mol_type = other DNA
tatcacaggctccaggaagggcgtgggtggggtaga

SEQ ID NO: 2128 - DNA, 38 bp, synthetic construct
  misc_feature 1..38: note = Description of Artificial Sequence: Synthetic oligonucleotide
  source 1..38: mol_type = other DNA
tatcacaggctccaggaagggggcgtgggtggggtaga

SEQ ID NO: 2129 - DNA, 42 bp, synthetic construct
  misc_feature 1..42: note = Description of Artificial Sequence: Synthetic oligonucleotide
  source 1..42: mol_type = other DNA
tatcacaggctccaggaagggtttgggcgtgggtggggtaga

SEQ ID NO: 2130 - DNA, 36 bp, synthetic construct
  misc_feature 1..36: note = Description of Artificial Sequence: Synthetic oligonucleotide
  source 1..36: mol_type = other DNA
tatcacaggctccaggaagggtttgggtggggtaga

SEQ ID NO: 2131 - DNA, 33 bp, synthetic construct
  misc_feature 1..33: note = Description of Artificial Sequence: Synthetic oligonucleotide
  source 1..33: mol_type = other DNA
tatcacaggctccaggggcgtgggtggggtaga

SEQ ID NO: 2132 - DNA, 23 bp, synthetic construct
  misc_feature 1..23: note = Description of Artificial Sequence: Synthetic oligonucleotide
  source 1..23: mol_type = other DNA
gaagggtttggcctctgattagg

SEQ ID NO: 2133 - DNA, 41 bp, synthetic construct
  misc_feature 1..41: note = Description of Artificial Sequence: Synthetic oligonucleotide
  source 1..41: mol_type = other DNA
aggctccaggaagggtttggcgtgggtggggtagaagagga

SEQ ID NO: 2134 - DNA, 42 bp, synthetic construct
  misc_feature 1..42: note = Description of Artificial Sequence: Synthetic oligonucleotide
  source 1..42: mol_type = other DNA
aggctccaggaagggtttgggcgtgggtggggtagaagagga

SEQ ID NO: 2135 - DNA, 33 bp, synthetic construct
  misc_feature 1..33: note = Description of Artificial Sequence: Synthetic oligonucleotide
  source 1..33: mol_type = other DNA
aggctccaggggcgtgggtggggtagaagagga

SEQ ID NO: 2136 - DNA, 30 bp, synthetic construct
  misc_feature 1..30: note = Description of Artificial Sequence: Synthetic oligonucleotide
  source 1..30: mol_type = other DNA
aggctccaggaagggtggggtagaagagga

SEQ ID NO: 2137 - DNA, 48 bp, synthetic construct
  misc_feature 1..48: note = Description of Artificial Sequence: Synthetic oligonucleotide
  source 1..48: mol_type = other DNA
aggctccaggaagggtttggcctctggcgtgggtggggtagaagagga

SEQ ID NO: 2138 - DNA, 36 bp, synthetic construct
  misc_feature 1..36: note = Description of Artificial Sequence: Synthetic oligonucleotide
  source 1..36: mol_type = other DNA
aggctccaggaagggcgtgggtggggtagaagagga

SEQ ID NO: 2139 - DNA, 38 bp, synthetic construct
  misc_feature 1..38: note = Description of Artificial Sequence: Synthetic oligonucleotide
  source 1..38: mol_type = other DNA
aggctccaggaagggtttggcctctgcgtagaagagga

SEQ ID NO: 2140 - DNA, 35 bp, synthetic construct
  misc_feature 1..35: note = Description of Artificial Sequence: Synthetic oligonucleotide
  source 1..35: mol_type = other DNA
aggctccaggaagggttgggtggggtagaagagga

SEQ ID NO: 2141 - DNA, 41 bp, synthetic construct; identical to SEQ ID NO: 2133
  misc_feature 1..41: note = Description of Artificial Sequence: Synthetic oligonucleotide
  source 1..41: mol_type = other DNA

SEQ ID NO: 2142 - DNA, 42 bp, synthetic construct; identical to SEQ ID NO: 2134
  misc_feature 1..42: note = Description of Artificial Sequence: Synthetic oligonucleotide
  source 1..42: mol_type = other DNA

SEQ ID NO: 2143 - DNA, 30 bp, synthetic construct; identical to SEQ ID NO: 2136
  misc_feature 1..30: note = Description of Artificial Sequence: Synthetic oligonucleotide
  source 1..30: mol_type = other DNA

SEQ ID NO: 2144 - DNA, 32 bp, synthetic construct
  misc_feature 1..32: note = Description of Artificial Sequence: Synthetic oligonucleotide
  source 1..32: mol_type = other DNA
aggctccaggaagggtttggggtagaagagga

SEQ ID NO: 2145 - DNA, 38 bp, synthetic construct
  misc_feature 1..38: note = Description of Artificial Sequence: Synthetic oligonucleotide
  source 1..38: mol_type = other DNA
aggctccaggaagggggcgtgggtggggtagaagagga

SEQ ID NO: 2146 - DNA, 31 bp, synthetic construct
  misc_feature 1..31: note = Description of Artificial Sequence: Synthetic oligonucleotide
  source 1..31: mol_type = other DNA
aggctccaggcgtgggtggggtagaagagga

SEQ ID NO: 2147 - DNA, 36 bp, synthetic construct; identical to SEQ ID NO: 2138
  misc_feature 1..36: note = Description of Artificial Sequence: Synthetic oligonucleotide
  source 1..36: mol_type = other DNA

SEQ ID NO: 2148 - DNA, 21 bp, synthetic construct
  misc_feature 1..21: note = Description of Artificial Sequence: Synthetic oligonucleotide
  source 1..21: mol_type = other DNA
aggctccagggtagaagagga

SEQ ID NO: 2149 - DNA, 36 bp, synthetic construct
  misc_feature 1..36: note = Description of Artificial Sequence: Synthetic oligonucleotide
  source 1..36: mol_type = other DNA
aggctccaggaagggtttgggtggggtagaagagga

SEQ ID NO: 2150 - DNA, 23 bp, synthetic construct
  misc_feature 1..23: note = Description of Artificial Sequence: Synthetic oligonucleotide
  source 1..23: mol_type = other DNA
aagggtttggcctctgattaggg

SEQ ID NO: 2151 - DNA, 64 bp, synthetic construct
  misc_feature 1..64: note = Description of Artificial Sequence: Synthetic oligonucleotide
  source 1..64: mol_type = other DNA
ggctccaggaagggtttggcctctgattccccattgtgggggcgtgggtggggtagaagaggac

SEQ ID NO: 2152 - DNA, 35 bp, synthetic construct
  misc_feature 1..35: note = Description of Artificial Sequence: Synthetic oligonucleotide
  source 1..35: mol_type = other DNA
ggctccaggaagggtttggtggggtagaagaggac

SEQ ID NO: 2153 - DNA, 41 bp, synthetic construct
  misc_feature 1..41: note = Description of Artificial Sequence: Synthetic oligonucleotide
  source 1..41: mol_type = other DNA
ggctccaggaagggtttggcgtgggtggggtagaagaggac

SEQ ID NO: 2154 - DNA, 36 bp, synthetic construct
  misc_feature 1..36: note = Description of Artificial Sequence: Synthetic oligonucleotide
  source 1..36: mol_type = other DNA
ggctccaggaagggcgtgggtggggtagaagaggac

SEQ ID NO: 2155 - DNA, 36 bp, synthetic construct
  misc_feature 1..36: note = Description of Artificial Sequence: Synthetic oligonucleotide
  source 1..36: mol_type = other DNA
ggctccaggaagggtttgggtggggtagaagaggac

SEQ ID NO: 2156 - DNA, 51 bp, synthetic construct
  misc_feature 1..51: note = Description of Artificial Sequence: Synthetic oligonucleotide
  source 1..51: mol_type = other DNA
ggctccaggaagggtttggcctctgagggcgtgggtggggtagaagaggac

SEQ ID NO: 2157 - DNA, 42 bp, synthetic construct
  misc_feature 1..42: note = Description of Artificial Sequence: Synthetic oligonucleotide
  source 1..42: mol_type = other DNA
ggctccaggaagggtttggccgtgggtggggtagaagaggac

SEQ ID NO: 2158 - DNA, 61 bp, synthetic construct
  misc_feature 1..61: note = Description of Artificial Sequence: Synthetic oligonucleotide
  source 1..61: mol_type = other DNA
ggctccaggaagggtttggcctctgaattagggtgggggcgtgggtggggtagaagaggac

SEQ ID NO: 2159 - DNA, 40 bp, synthetic construct
  misc_feature 1..40: note = Description of Artificial Sequence: Synthetic oligonucleotide
  source 1..40: mol_type = other DNA
ggctccaggaagggtttgcgtgggtggggtagaagaggac

SEQ ID NO: 2160 - DNA, 32 bp, synthetic construct
  misc_feature 1..32: note = Description of Artificial Sequence: Synthetic oligonucleotide
  source 1..32: mol_type = other DNA
ggctccaggaagggtttggggtagaagaggac

SEQ ID NO: 2161 - DNA, 34 bp, synthetic construct
  misc_feature 1..34: note = Description of Artificial Sequence: Synthetic oligonucleotide
  source 1..34: mol_type = other DNA
ggctccaggaagggtgggtggggtagaagaggac

SEQ ID NO: 2162 - DNA, 23 bp, synthetic construct
  misc_feature 1..23: note = Description of Artificial Sequence: Synthetic oligonucleotide
  source 1..23: mol_type = other DNA
ggtttggcctctgattagggtgg

SEQ ID NO: 2163 - DNA, 41 bp, synthetic construct
  misc_feature 1..41: note = Description of Artificial Sequence: Synthetic oligonucleotide
  source 1..41: mol_type = other DNA
tccaggaagggtttggcgtgggtggggtagaagaggactgg

SEQ ID NO: 2164 - DNA, 30 bp, synthetic construct
  misc_feature 1..30: note = Description of Artificial Sequence: Synthetic oligonucleotide
  source 1..30: mol_type = other DNA
tccaggaagggtggggtagaagaggactgg

SEQ ID NO: 2165 - DNA, 59 bp, synthetic construct
  misc_feature 1..59: note = Description of Artificial Sequence: Synthetic oligonucleotide
  source 1..59: mol_type = other DNA
tccaggaagggtttggcctctgattaggtgggggcgtgggtggggtagaagaggactgg

SEQ ID NO: 2166 - DNA, 25 bp, synthetic construct
  misc_feature 1..25: note = Description of Artificial Sequence: Synthetic oligonucleotide
  source 1..25: mol_type = other DNA
tccaggaagggtagaagaggactgg

SEQ ID NO: 2167 - DNA, 38 bp, synthetic construct
  misc_feature 1..38: note = Description of Artificial Sequence: Synthetic oligonucleotide
  source 1..38: mol_type = other DNA
tccaggaagggggcgtgggtggggtagaagaggactgg

SEQ ID NO: 2168 - DNA, 36 bp, synthetic construct
  misc_feature 1..36: note = Description of Artificial Sequence: Synthetic oligonucleotide
  source 1..36: mol_type = other DNA
tccaggaagggcgtgggtggggtagaagaggactgg

SEQ ID NO: 2169 - DNA, 36 bp, synthetic construct
  misc_feature 1..36: note = Description of Artificial Sequence: Synthetic oligonucleotide
  source 1..36: mol_type = other DNA
tccaggaagggtttgggtggggtagaagaggactgg

SEQ ID NO: 2170 - DNA, 59 bp, synthetic construct
  misc_feature 1..59: note = Description of Artificial Sequence: Synthetic oligonucleotide
  source 1..59: mol_type = other DNA
tccaggaagggtttggcctctgattgggtgggggcgtgggtggggtagaagaggactgg

SEQ ID NO: 2171 - DNA, 41 bp, synthetic construct; identical to SEQ ID NO: 2163
  misc_feature 1..41: note = Description of Artificial Sequence: Synthetic oligonucleotide
  source 1..41: mol_type = other DNA

SEQ ID NO: 2172 - DNA, 38 bp, synthetic construct; identical to SEQ ID NO: 2167
  misc_feature 1..38: note = Description of Artificial Sequence: Synthetic oligonucleotide
  source 1..38: mol_type = other DNA

SEQ ID NO: 2173 - DNA, 36 bp, synthetic construct; identical to SEQ ID NO: 2169
  misc_feature 1..36: note = Description of Artificial Sequence: Synthetic oligonucleotide
  source 1..36: mol_type = other DNA

SEQ ID NO: 2174 - DNA, 59 bp, synthetic construct; identical to SEQ ID NO: 2165
  misc_feature 1..59: note = Description of Artificial Sequence: Synthetic oligonucleotide
  source 1..59: mol_type = other DNA

SEQ ID NO: 2175 - DNA, 31 bp, synthetic construct
  misc_feature 1..31: note = Description of Artificial Sequence: Synthetic oligonucleotide
  source 1..31: mol_type = other DNA
tccaggaagggttggggtagaagaggactgg

SEQ ID NO: 2176 - DNA, 41 bp, synthetic construct
  misc_feature 1..41: note = Description of Artificial Sequence: Synthetic oligonucleotide
  source 1..41: mol_type = other DNA
tccaggaagggtttggcctgggtggggtagaagaggactgg

SEQ ID NO: 2177 - DNA, 30 bp, synthetic construct
  misc_feature 1..30: note = Description of Artificial Sequence: Synthetic oligonucleotide
  source 1..30: mol_type = other DNA
tccaggaagggtttggtagaagaggactgg

SEQ ID NO: 2178 - DNA, 23 bp, synthetic construct
  misc_feature 1..23: note = Description of Artificial Sequence: Synthetic oligonucleotide
  source 1..23: mol_type = other DNA
gtttggcctctgattagggtggg

SEQ ID NO: 2179 - DNA, 59 bp, synthetic construct
  misc_feature 1..59: note = Description of Artificial Sequence: Synthetic oligonucleotide
  source 1..59: mol_type = other DNA
ccaggaagggtttggcctctgattaggtgggggcgtgggtggggtagaagaggactggc

SEQ ID NO: 2180 - DNA, 41 bp, synthetic construct
  misc_feature 1..41: note = Description of Artificial Sequence: Synthetic oligonucleotide
  source 1..41: mol_type = other DNA
ccaggaagggtttggcgtgggtggggtagaagaggactggc

SEQ ID NO: 2181 - DNA, 58 bp, synthetic construct
  misc_feature 1..58: note = Description of Artificial Sequence: Synthetic oligonucleotide
  source 1..58: mol_type = other DNA
ccaggaagggtttggcctctgattggtgggggcgtgggtggggtagaagaggactggc

SEQ ID NO: 2182 - DNA, 36 bp, synthetic construct
  misc_feature 1..36: note = Description of Artificial Sequence: Synthetic oligonucleotide
  source 1..36: mol_type = other DNA
ccaggaagggcgtgggtggggtagaagaggactggc

SEQ ID NO: 2183 - DNA, 38 bp, synthetic construct
  misc_feature 1..38: note = Description of Artificial Sequence: Synthetic oligonucleotide
  source 1..38: mol_type = other DNA
ccaggaagggggcgtgggtggggtagaagaggactggc

SEQ ID NO: 2184 - DNA, 36 bp, synthetic construct
  misc_feature 1..36: note = Description of Artificial Sequence: Synthetic oligonucleotide
  source 1..36: mol_type = other DNA
ccaggaagggtttgggtggggtagaagaggactggc

SEQ ID NO: 2185 - DNA, 56 bp, synthetic construct
  misc_feature 1..56: note = Description of Artificial Sequence: Synthetic oligonucleotide
  source 1..56: mol_type = other DNA
ccaggaagggtttggcctctgaggtgggggcgtgggtggggtagaagaggactggc

SEQ ID NO: 2186 - DNA, 59 bp, synthetic construct; identical to SEQ ID NO: 2179
  misc_feature 1..59: note = Description of Artificial Sequence: Synthetic oligonucleotide
  source 1..59: mol_type = other DNA

SEQ ID NO: 2187 - DNA, 41 bp, synthetic construct; identical to SEQ ID NO: 2180
  misc_feature 1..41: note = Description of Artificial Sequence: Synthetic oligonucleotide
  source 1..41: mol_type = other DNA

SEQ ID NO: 2188 - DNA, 36 bp, synthetic construct; identical to SEQ ID NO: 2184
  misc_feature 1..36: note = Description of Artificial Sequence: Synthetic oligonucleotide
  source 1..36: mol_type = other DNA

SEQ ID NO: 2189 - DNA, 58 bp, synthetic construct; identical to SEQ ID NO: 2181
  misc_feature 1..58: note = Description of Artificial Sequence: Synthetic oligonucleotide
  source 1..58: mol_type = other DNA

SEQ ID NO: 2190 - DNA, 55 bp, synthetic construct
  misc_feature 1..55: note = Description of Artificial Sequence: Synthetic oligonucleotide
  source 1..55: mol_type = other DNA
ccaggaagggtttggcctctgattaggggcgtgggtggggtagaagaggactggc

SEQ ID NO: 2191 - DNA, 36 bp, synthetic construct; identical to SEQ ID NO: 2182
  misc_feature 1..36: note = Description of Artificial Sequence: Synthetic oligonucleotide
  source 1..36: mol_type = other DNA

SEQ ID NO: 2192 - DNA, 61 bp, synthetic construct
  misc_feature 1..61: note = Description of Artificial Sequence: Synthetic oligonucleotide
  source 1..61: mol_type = other DNA
ccaggaagggtttggcctctgattagaggtgggggcgtgggtggggtagaagaggactggc

SEQ ID NO: 2193 - DNA, 59 bp, synthetic construct; identical to SEQ ID NO: 2179
  misc_feature 1..59: note = Description of Artificial Sequence: Synthetic oligonucleotide
  source 1..59: mol_type = other DNA

SEQ ID NO: 2194 - DNA, 58 bp, synthetic construct; identical to SEQ ID NO: 2181
  misc_feature 1..58: note = Description of Artificial Sequence: Synthetic oligonucleotide
  source 1..58: mol_type = other DNA

SEQ ID NO: 2195 - DNA, 36 bp, synthetic construct; identical to SEQ ID NO: 2184
  misc_feature 1..36: note = Description of Artificial Sequence: Synthetic oligonucleotide
  source 1..36: mol_type = other DNA

SEQ ID NO: 2196 - DNA, 41 bp, synthetic construct; identical to SEQ ID NO: 2180
  misc_feature 1..41: note = Description of Artificial Sequence: Synthetic oligonucleotide
  source 1..41: mol_type = other DNA

SEQ ID NO: 2197 - DNA, 44 bp, synthetic construct
  misc_feature 1..44: note = Description of Artificial Sequence: Synthetic oligonucleotide
  source 1..44: mol_type = other DNA
ccaggaagggtttgggggcgtgggtggggtagaagaggactggc

SEQ ID NO: 2198 - DNA, 58 bp, synthetic construct
  misc_feature 1..58: note = Description of Artificial Sequence: Synthetic oligonucleotide
  source 1..58: mol_type = other DNA
ccaggaagggtttggcctctgattagtgggggcgtgggtggggtagaagaggactggc

SEQ ID NO: 2199 - DNA, 36 bp, synthetic construct; identical to SEQ ID NO: 2182
  misc_feature 1..36: note = Description of Artificial Sequence: Synthetic oligonucleotide
  source 1..36: mol_type = other DNA

SEQ ID NO: 2200 - DNA, 59 bp, synthetic construct; identical to SEQ ID NO: 2179
  misc_feature 1..59: note = Description of Artificial Sequence: Synthetic oligonucleotide
  source 1..59: mol_type = other DNA

SEQ ID NO: 2201 - DNA, 41 bp, synthetic construct; identical to SEQ ID NO: 2180
  misc_feature 1..41: note = Description of Artificial Sequence: Synthetic oligonucleotide
  source 1..41: mol_type = other DNA

SEQ ID NO: 2202 - DNA, 58 bp, synthetic construct; identical to SEQ ID NO: 2181
  misc_feature 1..58: note = Description of Artificial Sequence: Synthetic oligonucleotide
  source 1..58: mol_type = other DNA

SEQ ID NO: 2203 - DNA, 37 bp, synthetic construct
  misc_feature 1..37: note = Description of Artificial Sequence: Synthetic oligonucleotide
  source 1..37: mol_type = other DNA
ccaggaaggggcgtgggtggggtagaagaggactggc

SEQ ID NO: 2204 - DNA, 36 bp, synthetic construct; identical to SEQ ID NO: 2182
  misc_feature 1..36: note = Description of Artificial Sequence: Synthetic oligonucleotide
  source 1..36: mol_type = other DNA

SEQ ID NO: 2205 - DNA, 58 bp, synthetic construct; identical to SEQ ID NO: 2198
  misc_feature 1..58: note = Description of Artificial Sequence: Synthetic oligonucleotide
  source 1..58: mol_type = other DNA

SEQ ID NO: 2206 - DNA, 44 bp, synthetic construct; identical to SEQ ID NO: 2197
  misc_feature 1..44: note = Description of Artificial Sequence: Synthetic oligonucleotide
  source 1..44: mol_type = other DNA

SEQ ID NO: 2207 - DNA, 23 bp, synthetic construct
  misc_feature 1..23: note = Description of Artificial Sequence: Synthetic oligonucleotide
  source 1..23: mol_type = other DNA
tttggcctctgattagggtgggg

SEQ ID NO: 2208 - DNA, 59 bp, synthetic construct
  misc_feature 1..59: note = Description of Artificial Sequence: Synthetic oligonucleotide
  source 1..59: mol_type = other DNA
caggaagggtttggcctctgattaggtgggggcgtgggtggggtagaagaggactggca

SEQ ID NO: 2209 - DNA, 41 bp, synthetic construct
  misc_feature 1..41: note = Description of Artificial Sequence: Synthetic oligonucleotide
  source 1..41: mol_type = other DNA
caggaagggtttggcgtgggtggggtagaagaggactggca

SEQ ID NO: 2210 - DNA, 58 bp, synthetic construct
  misc_feature 1..58: note = Description of Artificial Sequence: Synthetic oligonucleotide
  source 1..58: mol_type = other DNA
caggaagggtttggcctctgattagtgggggcgtgggtggggtagaagaggactggca

SEQ ID NO: 2211 - DNA, 55 bp, synthetic construct
  misc_feature 1..55: note = Description of Artificial Sequence: Synthetic oligonucleotide
  source 1..55: mol_type = other DNA
caggaagggtttggcctctgattaggggcgtgggtggggtagaagaggactggca

SEQ ID NO: 2212 - DNA, 36 bp, synthetic construct
  misc_feature 1..36: note = Description of Artificial Sequence: Synthetic oligonucleotide
  source 1..36: mol_type = other DNA
caggaagggtttgggtggggtagaagaggactggca

SEQ ID NO: 2213 - DNA, 47 bp, synthetic construct
  misc_feature 1..47: note = Description of Artificial Sequence: Synthetic oligonucleotide
  source 1..47: mol_type = other DNA
caggaagggtttggtgggggcgtgggtggggtagaagaggactggca

SEQ ID NO: 2214 - DNA, 53 bp, synthetic construct
  misc_feature 1..53: note = Description of Artificial Sequence: Synthetic oligonucleotide
  source 1..53: mol_type = other DNA
caggaagggtttggcctctgtgggggcgtgggtggggtagaagaggactggca

SEQ ID NO: 2215 - DNA, 30 bp, synthetic construct
  misc_feature 1..30: note = Description of Artificial Sequence: Synthetic oligonucleotide
  source 1..30: mol_type = other DNA
caggaagggtggggtagaagaggactggca

SEQ ID NO: 2216 - DNA, 59 bp, synthetic construct; identical to SEQ ID NO: 2208
  misc_feature 1..59: note = Description of Artificial Sequence: Synthetic oligonucleotide
  source 1..59: mol_type = other DNA

SEQ ID NO: 2217 - DNA, 41 bp, synthetic construct; identical to SEQ ID NO: 2209
  misc_feature 1..41: note = Description of Artificial Sequence: Synthetic oligonucleotide
  source 1..41: mol_type = other DNA

SEQ ID NO: 2218 - DNA, 30 bp, synthetic construct; identical to SEQ ID NO: 2215
  misc_feature 1..30: note = Description of Artificial Sequence: Synthetic oligonucleotide
  source 1..30: mol_type = other DNA

SEQ ID NO: 2219 - DNA, 58 bp, synthetic construct; identical to SEQ ID NO: 2210
  misc_feature 1..58: note = Description of Artificial Sequence: Synthetic oligonucleotide
  source 1..58: mol_type = other DNA

SEQ ID NO: 2220 - DNA, 56 bp, synthetic construct
  misc_feature 1..56: note = Description of Artificial Sequence: Synthetic oligonucleotide
  source 1..56: mol_type = other DNA
caggaagggtttggcctctgattagggggcgtgggtggggtagaagaggactggca

SEQ ID NO: 2221 - DNA, 55 bp, synthetic construct; identical to SEQ ID NO: 2211
  misc_feature 1..55: note = Description of Artificial Sequence: Synthetic oligonucleotide
  source 1..55: mol_type = other DNA

SEQ ID NO: 2222 - DNA, 59 bp, synthetic construct; identical to SEQ ID NO: 2208
  misc_feature 1..59: note = Description of Artificial Sequence: Synthetic oligonucleotide
  source 1..59: mol_type = other DNA

SEQ ID NO: 2223 - DNA, 58 bp, synthetic construct; identical to SEQ ID NO: 2210
  misc_feature 1..58: note = Description of Artificial Sequence: Synthetic oligonucleotide
  source 1..58: mol_type = other DNA

SEQ ID NO: 2224 - DNA, 30 bp, synthetic construct
  misc_feature 1..30: note = Description of Artificial Sequence: Synthetic oligonucleotide
  source 1..30: mol_type = other DNA
caggaagggtttggcctaagaggactggca

SEQ ID NO: 2225 - DNA, 25 bp, synthetic construct
  misc_feature 1..25: note = Description of Artificial Sequence: Synthetic oligonucleotide
  source 1..25: mol_type = other DNA
caggaagggtttgggaggactggca

SEQ ID NO: 2226 - DNA, 27 bp, synthetic construct
  misc_feature 1..27: note = Description of Artificial Sequence: Synthetic oligonucleotide
  source 1..27: mol_type = other DNA
caggaagggtttagaagaggactggca

SEQ ID NO: 2227 - DNA, 29 bp, synthetic construct
  misc_feature 1..29: note = Description of Artificial Sequence: Synthetic oligonucleotide
  source 1..29: mol_type = other DNA
caggaagggtttggcctcgaggactggca

SEQ ID NO: 2228 - DNA, 56 bp, synthetic construct; identical to SEQ ID NO: 2220
  misc_feature 1..56: note = Description of Artificial Sequence: Synthetic oligonucleotide
  source 1..56: mol_type = other DNA

SEQ ID NO: 2229 - DNA, 57 bp, synthetic construct
  misc_feature 1..57: note = Description of Artificial Sequence: Synthetic oligonucleotide
  source 1..57: mol_type = other DNA
caggaagggtttggcctctgattaggggggcgtgggtggggtagaagaggactggca

SEQ ID NO: 2230 - DNA, 59 bp, synthetic construct; identical to SEQ ID NO: 2208
  misc_feature 1..59: note = Description of Artificial Sequence: Synthetic oligonucleotide
  source 1..59: mol_type = other DNA

SEQ ID NO: 2231 - DNA, 41 bp, synthetic construct; identical to SEQ ID NO: 2209
  misc_feature 1..41: note = Description of Artificial Sequence: Synthetic oligonucleotide
  source 1..41: mol_type = other DNA

SEQ ID NO: 2232 - DNA, 58 bp, synthetic construct; identical to SEQ ID NO: 2210
  misc_feature 1..58: note = Description of Artificial Sequence: Synthetic oligonucleotide
  source 1..58: mol_type = other DNA

SEQ ID NO: 2233 - DNA, 32 bp, synthetic construct
  misc_feature 1..32: note = Description of Artificial Sequence: Synthetic oligonucleotide
  source 1..32: mol_type = other DNA
caggaagggtttggggtagaagaggactggca

SEQ ID NO: 2234 - DNA, 55 bp, synthetic construct; identical to SEQ ID NO: 2211
  misc_feature 1..55: note = Description of Artificial Sequence: Synthetic oligonucleotide
  source 1..55: mol_type = other DNA

SEQ ID NO: 2235 - DNA, 56 bp, synthetic construct; identical to SEQ ID NO: 2220
  misc_feature 1..56: note = Description of Artificial Sequence: Synthetic oligonucleotide
  source 1..56: mol_type = other DNA

SEQ ID NO: 2236 - DNA, 44 bp, synthetic construct
  misc_feature 1..44: note = Description of Artificial Sequence: Synthetic oligonucleotide
  source 1..44: mol_type = other DNA
caggaagggtttgggggcgtgggtggggtagaagaggactggca

SEQ ID NO: 2237 - DNA, 23 bp, synthetic construct
  misc_feature 1..23: note = Description of Artificial Sequence: Synthetic oligonucleotide
  source 1..23: mol_type = other DNA
ttggcctctgattagggtggggg

SEQ ID NO: 2238 - DNA, 56 bp, synthetic construct
  misc_feature 1..56: note = Description of Artificial Sequence: Synthetic oligonucleotide
  source 1..56: mol_type = other DNA
aggaagggtttggcctctgattagggggcgtgggtggggtagaagaggactggcag

SEQ ID NO: 2239 - DNA, 54 bp, synthetic construct
  misc_feature 1..54: note = Description of Artificial Sequence: Synthetic oligonucleotide
  source 1..54: mol_type = other DNA
aggaagggtttggcctctgattagggcgtgggtggggtagaagaggactggcag

SEQ ID NO: 2240 - DNA, 55 bp, synthetic construct
  misc_feature 1..55: note = Description of Artificial Sequence: Synthetic oligonucleotide
  source 1..55: mol_type = other DNA
aggaagggtttggcctctgattaggggcgtgggtggggtagaagaggactggcag

SEQ ID NO: 2241 - DNA, 59 bp, synthetic construct
  misc_feature 1..59: note = Description of Artificial Sequence: Synthetic oligonucleotide
  source 1..59: mol_type = other DNA
aggaagggtttggcctctgattaggtgggggcgtgggtggggtagaagaggactggcag

SEQ ID NO: 2242 - DNA, 58 bp, synthetic construct
  misc_feature 1..58: note = Description of Artificial Sequence: Synthetic oligonucleotide
  source 1..58: mol_type = other DNA
aggaagggtttggcctctgattagtgggggcgtgggtggggtagaagaggactggcag

SEQ ID NO: 2243 - DNA, 55 bp, synthetic construct
  misc_feature 1..55: note = Description of Artificial Sequence: Synthetic oligonucleotide
  source 1..55: mol_type = other DNA
aggaagggtttggcctctgattgggggcgtgggtggggtagaagaggactggcag

SEQ ID NO: 2244 - DNA, 59 bp, synthetic construct
  misc_feature 1..59: note = Description of Artificial Sequence: Synthetic oligonucleotide
  source 1..59: mol_type = other DNA
aggaagggtttggcctctgattagggtgggggcgtgggtgggtagaagaggactggcag

SEQ ID NO: 2245 - DNA, 23 bp, synthetic construct
  misc_feature 1..23: note = Description of Artificial Sequence: Synthetic oligonucleotide
  source 1..23: mol_type = other DNA
tctgattagggtgggggcgtggg

SEQ ID NO: 2246 - DNA, 48 bp, synthetic construct
  misc_feature 1..48: note = Description of Artificial Sequence: Synthetic oligonucleotide
  source 1..48: mol_type = other DNA
ggtttggcctctgattagggtggggtagaagaggactggcagacctct

SEQ ID NO: 2247 - DNA, 49 bp, synthetic construct
  misc_feature 1..49: note = Description of Artificial Sequence: Synthetic oligonucleotide
  source 1..49: mol_type = other DNA
ggtttggcctctgattagggtgggggtagaagaggactggcagacctct

SEQ ID NO: 2248 - DNA, 52 bp, synthetic construct
  misc_feature 1..52: note = Description of Artificial Sequence: Synthetic oligonucleotide
  source 1..52: mol_type = other DNA
ggtttggcctctgattagggtgggtggggtagaagaggactggcagacctct

SEQ ID NO: 2249 - DNA, 42 bp, synthetic construct
  misc_feature 1..42: note = Description of Artificial Sequence: Synthetic oligonucleotide
  source 1..42: mol_type = other DNA
ggtttggcctctgatggggtagaagaggactggcagacctct

SEQ ID NO: 2250 - DNA, 31 bp, synthetic construct
  misc_feature 1..31: note = Description of Artificial Sequence: Synthetic oligonucleotide
  source 1..31: mol_type = other DNA
ggtttggcctctgatttactggcagacctct

SEQ ID NO: 2251 - DNA, 53 bp, synthetic construct
  misc_feature 1..53: note = Description of Artificial Sequence: Synthetic oligonucleotide
  source 1..53: mol_type = other DNA
ggtttggcctctgattggccgtgggtggggtagaagaggactggcagacctct

SEQ ID NO: 2252 - DNA, 44 bp, synthetic construct
  misc_feature 1..44: note = Description of Artificial Sequence: Synthetic oligonucleotide
  source 1..44: mol_type = other DNA
ggtttggcctctgattaggggtagaagaggactggcagacctct

SEQ ID NO: 2253 - DNA, 58 bp, synthetic construct
  misc_feature 1..58: note = Description of Artificial Sequence: Synthetic oligonucleotide
  source 1..58: mol_type = other DNA
ggtttggcctctgatccaagagcccgtgggtggggtagaagaggactggcagacctct

SEQ ID NO: 2254 - DNA, 59 bp, synthetic construct
  misc_feature 1..59: note = Description of Artificial Sequence: Synthetic oligonucleotide
  source 1..59: mol_type = other DNA
ggtttggcctctgattagggtgggggcgtgggtgggtagaagaggactggcagacctct

SEQ ID NO: 2255 - DNA, 23 bp, synthetic construct
  misc_feature 1..23: note = Description of Artificial Sequence: Synthetic oligonucleotide
  source 1..23: mol_type = other DNA
attagggtgggggcgtgggtggg

SEQ ID NO: 2256 - DNA, 48 bp, synthetic construct
  misc_feature 1..48: note = Description of Artificial Sequence: Synthetic oligonucleotide
  source 1..48: mol_type = other DNA
tggcctctgattagggtggggtagaagaggactggcagacctctccat

SEQ ID NO: 2257 - DNA, 49 bp, synthetic construct
  misc_feature 1..49: note = Description of Artificial Sequence: Synthetic oligonucleotide
  source 1..49: mol_type = other DNA
tggcctctgattagggtgggggtagaagaggactggcagacctctccat

SEQ ID NO: 2258 - DNA, 59 bp, synthetic construct
  misc_feature 1..59: note = Description of Artificial Sequence: Synthetic oligonucleotide
  source 1..59: mol_type = other DNA
tggcctctgattagggtgggggcgtggtggggtagaagaggactggcagacctctccat

SEQ ID NO: 2259 - DNA, 48 bp, synthetic construct
  misc_feature 1..48: note = Description of Artificial Sequence: Synthetic oligonucleotide
  source 1..48: mol_type = other DNA
tggcctctgattagggtgggggcgaagaggactggcagacctctccat

SEQ ID NO: 2260 - DNA, 23 bp, synthetic construct
  misc_feature 1..23: note = Description of Artificial Sequence: Synthetic oligonucleotide
  source 1..23: mol_type = other DNA
ttagggtgggggcgtgggtgggg

SEQ ID NO: 2261 - DNA, 48 bp, synthetic construct
  misc_feature 1..48: note = Description of Artificial Sequence: Synthetic oligonucleotide
  source 1..48: mol_type = other DNA
ggcctctgattagggtggggtagaagaggactggcagacctctccatc

SEQ ID NO: 2262 - DNA, 59 bp, synthetic construct
  misc_feature 1..59: note = Description of Artificial Sequence: Synthetic oligonucleotide
  source 1..59: mol_type = other DNA
ggcctctgattagggtgggggcgtggtggggtagaagaggactggcagacctctccatc

SEQ ID NO: 2263 - DNA, 49 bp, synthetic construct
  misc_feature 1..49: note = Description of Artificial Sequence: Synthetic oligonucleotide
  source 1..49: mol_type = other DNA
ggcctctgattagggtgggggtagaagaggactggcagacctctccatc

SEQ ID NO: 2264 - DNA, 20 bp, synthetic construct
  misc_feature 1..20: note = Description of Artificial Sequence: Synthetic oligonucleotide
  source 1..20: mol_type = other DNA
tgtaactaataaataccagg

SEQ ID NO: 2265 - DNA, 59 bp, synthetic construct
  misc_feature 1..59: note = Description of Artificial Sequence: Synthetic oligonucleotide
  source 1..59: mol_type = other DNA
ctgctgaggtgtaactaataaataccggaggcagcattttagttcacaagctcggagca

SEQ ID NO: 2266 - DNA, 59 bp, synthetic construct
  misc_feature 1..59: note = Description of Artificial Sequence: Synthetic oligonucleotide
  source 1..59: mol_type = other DNA
ctgctgaggtgtaactaataaatacaggaggcagcattttagttcacaagctcggagca

SEQ ID NO: 2267 - DNA, 61 bp, synthetic construct
  misc_feature 1..61: note = Description of Artificial Sequence: Synthetic oligonucleotide
  source 1..61: mol_type = other DNA
ctgctgaggtgtaactaataaatacccaggaggcagcattttagttcacaagctcggagca

SEQ ID NO: 2268 - DNA, 58 bp, synthetic construct
  misc_feature 1..58: note = Description of Artificial Sequence: Synthetic oligonucleotide
  source 1..58: mol_type = other DNA
ctgctgaggtgtaactaataaataccgaggcagcattttagttcacaagctcggagca

SEQ ID NO: 2269 - DNA, 58 bp, synthetic construct
  misc_feature 1..58: note = Description of Artificial Sequence: Synthetic oligonucleotide
  source 1..58: mol_type = other DNA
ctgctgaggtgtaactaataaatcaggaggcagcattttagttcacaagctcggagca

SEQ ID NO: 2270 - DNA, 57 bp, synthetic construct
  misc_feature 1..57: note = Description of Artificial Sequence: Synthetic oligonucleotide
  source 1..57: mol_type = other DNA
ctgctgaggtgtaactaataaataggaggcagcattttagttcacaagctcggagca

SEQ ID NO: 2271 - DNA, 23 bp, synthetic construct
  misc_feature 1..23: note = Description of Artificial Sequence: Synthetic oligonucleotide
  source 1..23: mol_type = other DNA
cagtgagatgagatatcaaaggg

SEQ ID NO: 2272 - DNA, 61 bp, synthetic construct
  misc_feature 1..61: note = Description of Artificial Sequence: Synthetic oligonucleotide
  source 1..61: mol_type = other DNA
gggagatggaatgaacacttttcgtcccctttggatatctcatctcactgagctctgggcc

SEQ ID NO: 2273 - DNA, 58 bp, synthetic construct
  misc_feature 1..58: note = Description of Artificial Sequence: Synthetic oligonucleotide
  source 1..58: mol_type = other DNA
gggagatggaatgaacacttttcgtcccctttgatctcatctcactgagctctgggcc

SEQ ID NO: 2274 - DNA, 54 bp, synthetic construct
  misc_feature 1..54: note = Description of Artificial Sequence: Synthetic oligonucleotide
  source 1..54: mol_type = other DNA
gggagatggaatgaacacttttcgtcccctttgcatctcactgagctctgggcc

SEQ ID NO: 2275 - DNA, 55 bp, synthetic construct
  misc_feature 1..55: note = Description of Artificial Sequence: Synthetic oligonucleotide
  source 1..55: mol_type = other DNA
gggagatggaatgaacacttttcgtcccctttctcatctcactgagctctgggcc

SEQ ID NO: 2276 - DNA, 59 bp, synthetic construct
  misc_feature 1..59: note = Description of Artificial Sequence: Synthetic oligonucleotide
  source 1..59: mol_type = other DNA
gggagatggaatgaacacttttcgtcccctttatatctcatctcactgagctctgggcc

SEQ ID NO: 2277 - DNA, 57 bp, synthetic construct
  misc_feature 1..57: note = Description of Artificial Sequence: Synthetic oligonucleotide
  source 1..57: mol_type = other DNA
gggagatggaatgaacacttttcgtcccctttgtctcatctcactgagctctgggcc

SEQ ID NO: 2278 - DNA, 58 bp, synthetic construct
  misc_feature 1..58: note = Description of Artificial Sequence: Synthetic oligonucleotide
  source 1..58: mol_type = other DNA
gggagatggaatgaacacttttcgtccccttttatctcatctcactgagctctgggcc

SEQ ID NO: 2279 - DNA, 59 bp, synthetic construct
  misc_feature 1..59: note = Description of Artificial Sequence: Synthetic oligonucleotide
  source 1..59: mol_type = other DNA
gggagatggaatgaacacttttcgtcccctttgtatctcatctcactgagctctgggcc

SEQ ID NO: 2280 - DNA, 23 bp, synthetic construct
  misc_feature 1..23: note = Description of Artificial Sequence: Synthetic oligonucleotide
  source 1..23: mol_type = other DNA
tcagtgagatgagatatcaaagg

SEQ ID NO: 2281 - DNA, 61 bp, synthetic construct
  misc_feature 1..61: note = Description of Artificial Sequence: Synthetic oligonucleotide
  source 1..61: mol_type = other DNA
ggagatggaatgaacacttttcgtcccctttgaatatctcatctcactgagctctgggccg

SEQ ID NO: 2282 - DNA, 59 bp, synthetic construct
  misc_feature 1..59: note = Description of Artificial Sequence: Synthetic oligonucleotide
  source 1..59: mol_type = other DNA
ggagatggaatgaacacttttcgtcccctttgaatctcatctcactgagctctgggccg

SEQ ID NO: 2283 - DNA, 58 bp, synthetic construct
  misc_feature 1..58: note = Description of Artificial Sequence: Synthetic oligonucleotide
  source 1..58: mol_type = other DNA
ggagatggaatgaacacttttcgtcccctttgatctcatctcactgagctctgggccg

SEQ ID NO: 2284 - DNA, 59 bp, synthetic construct
  misc_feature 1..59: note = Description of Artificial Sequence: Synthetic oligonucleotide
  source 1..59: mol_type = other DNA
ggagatggaatgaacacttttcgtcccctttgtatctcatctcactgagctctgggccg

SEQ ID NO: 2285 - DNA, 58 bp, synthetic construct
  misc_feature 1..58: note = Description of Artificial Sequence: Synthetic oligonucleotide
  source 1..58: mol_type = other DNA
ggagatggaatgaacacttttcgtccccttatatctcatctcactgagctctgggccg

SEQ ID NO: 2286 - DNA, 55 bp, synthetic construct
  misc_feature 1..55: note = Description of Artificial Sequence: Synthetic oligonucleotide
  source 1..55: mol_type = other DNA
ggagatggaatgaacacttttcgtcccctttgacatctcactgagctctgggccg

SEQ ID NO: 2287 - DNA, 23 bp, synthetic construct
  misc_feature 1..23: note = Description of Artificial Sequence: Synthetic oligonucleotide
  source 1..23: mol_type = other DNA
gtgccagatgaacttcccattgg

SEQ ID NO: 2288 - DNA, 59 bp, synthetic construct
  misc_feature 1..59: note = Description of Artificial Sequence: Synthetic oligonucleotide
  source 1..59: mol_type = other DNA
ctgtgggcagtgccagatgaacttccattgggggacattcttatttttatcgagcacaa

SEQ ID NO: 2289 - DNA, 58 bp, synthetic construct
  misc_feature 1..58: note = Description of Artificial Sequence: Synthetic oligonucleotide
  source 1..58: mol_type = other DNA
ctgtgggcagtgccagatgaacttcattgggggacattcttatttttatcgagcacaa

SEQ ID NO: 2290 - DNA, 61 bp, synthetic construct
  misc_feature 1..61: note = Description of Artificial Sequence: Synthetic oligonucleotide
  source 1..61: mol_type = other DNA
ctgtgggcagtgccagatgaacttccccattgggggacattcttatttttatcgagcacaa

SEQ ID NO: 2291 - DNA, 55 bp, synthetic construct
  misc_feature 1..55: note = Description of Artificial Sequence: Synthetic oligonucleotide
  source 1..55: mol_type = other DNA
ctgtgggcagtgccagatgaacattgggggacattcttatttttatcgagcacaa

SEQ ID NO: 2292 - DNA, 58 bp, synthetic construct
  misc_feature 1..58: note = Description of Artificial Sequence: Synthetic oligonucleotide
  source 1..58: mol_type = other DNA
ctgtgggcagtgccagatgaacttccttgggggacattcttatttttatcgagcacaa

SEQ ID NO: 2293 - DNA, 59 bp, synthetic construct; identical to SEQ ID NO: 2288
  misc_feature 1..59: note = Description of Artificial Sequence: Synthetic oligonucleotide
  source 1..59: mol_type = other DNA

SEQ ID NO: 2294 - DNA, 58 bp, synthetic construct; identical to SEQ ID NO: 2289
  misc_feature 1..58: note = Description of Artificial Sequence: Synthetic oligonucleotide
  source 1..58: mol_type = other DNA

SEQ ID NO: 2295 - DNA, 61 bp, synthetic construct; identical to SEQ ID NO: 2290
  misc_feature 1..61: note = Description of Artificial Sequence: Synthetic oligonucleotide
  source 1..61: mol_type = other DNA

SEQ ID NO: 2296 - DNA, 58 bp, synthetic construct; identical to SEQ ID NO: 2292
  misc_feature 1..58: note = Description of Artificial Sequence: Synthetic oligonucleotide
  source 1..58: mol_type = other DNA

SEQ ID NO: 2297 - DNA, 57 bp, synthetic construct
  misc_feature 1..57: note = Description of Artificial Sequence: Synthetic oligonucleotide
  source 1..57: mol_type = other DNA
ctgtgggcagtgccagatgaactcattgggggacattcttatttttatcgagcacaa

SEQ ID NO: 2298 - RNA, 36 nt, synthetic construct; identical to SEQ ID NO: 2003
  misc_feature 1..36: note = Description of Artificial Sequence: Synthetic oligonucleotide
  misc_difference 1..20: note = modified_base - a, c, u, g, unknown or other
  source 1..36: mol_type = other RNA

SEQ ID NO: 2299 - RNA, 36 nt, synthetic construct; identical to SEQ ID NO: 2003
  misc_feature 1..36: note = Description of Artificial Sequence: Synthetic oligonucleotide
  misc_difference 1..20: note = modified_base - a, c, u, g, unknown or other
  source 1..36: mol_type = other RNA

SEQ ID NO: 2300 - RNA, 36 nt, synthetic construct; identical to SEQ ID NO: 2003
  misc_feature 1..36: note = Description of Artificial Sequence: Synthetic oligonucleotide
  misc_difference 1..20: note = modified_base - a, c, u, g, unknown or other
  source 1..36: mol_type = other RNA

SEQ ID NO: 2301 - DNA, 73 bp, synthetic construct
  misc_feature 1..73: note = Description of Artificial Sequence: Synthetic oligonucleotide
  source 1..73: mol_type = other DNA
actgttgattagaggtagggaaatgattttaatctgtgaccttgggcaagtagctatctaatgactaaaatgg

SEQ ID NO: 2302 - DNA, 81 bp, synthetic construct
  misc_feature 1..81: note = Description of Artificial Sequence: Synthetic oligonucleotide
  source 1..81: mol_type = other DNA
actgttgattagaggtagggaaatgattttaatctgtgaccttggttgaatgggcaagtagctatctaatgactaaaatgg

SEQ ID NO: 2303 - DNA, 77 bp, synthetic construct
  misc_feature 1..77: note = Description of Artificial Sequence: Synthetic oligonucleotide
  source 1..77: mol_type = other DNA
actgttgattagaggtagggaaatgattttaatctgtgaccttgaatgggcaagtagctatctaatgactaaaatgg

SEQ ID NO: 2304 - DNA, 79 bp, synthetic construct
  misc_feature 1..79: note = Description of Artificial Sequence: Synthetic oligonucleotide
  source 1..79: mol_type = other DNA
actgttgattagaggtagggaaatgattttaatctgtgaccttgtgaatgggcaagtagctatctaatgactaaaatgg

SEQ ID NO: 2305 - DNA, 71 bp, synthetic construct
  misc_feature 1..71: note = Description of Artificial Sequence: Synthetic oligonucleotide
  source 1..71: mol_type = other DNA
actgttgattagaggtagggaaatgattttaatctgtgaatgggcaagtagctatctaatgactaaaatgg

SEQ ID NO: 2306 - DNA, 70 bp, synthetic construct
  misc_feature 1..70: note = Description of Artificial Sequence: Synthetic oligonucleotide
  source 1..70: mol_type = other DNA
atgggcaagtagctatctaatgactaaaatggaagagaaacagttttagtataacaagtgaaatacccat

SEQ ID NO: 2307 - DNA, 81 bp, synthetic construct
  misc_feature 1..81: note = Description of Artificial Sequence: Synthetic oligonucleotide
  source 1..81: mol_type = other DNA
atgggcaagtagctatctaatgactaaaatggaaaaacactggaagagaaacagttttagtataacaagtgaaatacccat

SEQ ID NO: 2308 - DNA, 78 bp, synthetic construct
  misc_feature 1..78: note = Description of Artificial Sequence: Synthetic oligonucleotide
  source 1..78: mol_type = other DNA
atgggcaagtagctatctaatgactaaaatggaacactggaagagaaacagttttagtataacaagtgaaatacccat

SEQ ID NO: 2309 - DNA, 78 bp, synthetic construct
  misc_feature 1..78: note = Description of Artificial Sequence: Synthetic oligonucleotide
  source 1..78: mol_type = other DNA
atgggcaagtagctatctaatgactaaaatggaaaactggaagagaaacagttttagtataacaagtgaaatacccat

SEQ ID NO: 2310 - DNA, 81 bp, synthetic construct
  misc_feature 1..81: note = Description of Artificial Sequence: Synthetic oligonucleotide
  source 1..81: mol_type = other DNA
atgggcaagtagctatctaatgactaaaatggaaaaccactggaagagaaacagttttagtataacaagtgaaatacccat

SEQ ID NO: 2311 - DNA, 77 bp, synthetic construct
  misc_feature 1..77: note = Description of Artificial Sequence: Synthetic oligonucleotide
  source 1..77: mol_type = other DNA
cactggaagagaaacagttttagtataacaagtgaaatacccatgagtctgaggtgcctataggacatctatataaa

SEQ ID NO: 2312 - DNA, 79 bp, synthetic construct
  misc_feature 1..79: note = Description of Artificial Sequence: Synthetic oligonucleotide
  source 1..79: mol_type = other DNA
cactggaagagaaacagttttagtataacaagtgaaatacccatctgagtctgaggtgcctataggacatctatataaa

SEQ ID NO: 2313 - DNA, 78 bp, synthetic construct
  misc_feature 1..78: note = Description of Artificial Sequence: Synthetic oligonucleotide
  source 1..78: mol_type = other DNA
cactggaagagaaacagttttagtataacaagtgaaatacccactgagtctgaggtgcctataggacatctatataaa

SEQ ID NO: 2314 - DNA, 78 bp, synthetic construct
  misc_feature 1..78: note = Description of Artificial Sequence: Synthetic oligonucleotide
  source 1..78: mol_type = other DNA
cactggaagagaaacagttttagtataacaagtgaaatacccatggagtctgaggtgcctataggacatctatataaa

SEQ ID NO: 2315 - DNA, 76 bp, synthetic construct
  misc_feature 1..76: note = Description of Artificial Sequence: Synthetic oligonucleotide
  source 1..76: mol_type = other DNA
cactggaagagaaacagttttagtataacaagtgaaataccctgagtctgaggtgcctataggacatctatataaa

SEQ ID NO: 2316 - DNA, 70 bp, synthetic construct
  misc_feature 1..70: note = Description of Artificial Sequence: Synthetic oligonucleotide
  source 1..70: mol_type = other DNA
taacaagtgaaatacccatgctgagtctgaggacatctatataaataagcccagtacattgtttgatata

SEQ ID NO: 2317 - DNA, 79 bp, synthetic construct
  misc_feature 1..79: note = Description of Artificial Sequence: Synthetic oligonucleotide
  source 1..79: mol_type = other DNA
taacaagtgaaatacccatgctgagtctgaggtgccataggacatctatataaataagcccagtacattgtttgatata

SEQ ID NO: 2318 - DNA, 81 bp, synthetic construct
  misc_feature 1..81: note = Description of Artificial Sequence: Synthetic oligonucleotide
  source 1..81: mol_type = other DNA
taacaagtgaaatacccatgctgagtctgaggtgccctataggacatctatataaataagcccagtacattgtttgatata

SEQ ID NO: 2319 - DNA, 81 bp, synthetic construct
  misc_feature 1..81: note = Description of Artificial Sequence: Synthetic oligonucleotide
  source 1..81: mol_type = other DNA
taacaagtgaaatacccatgctgagtctgaggtgccttataggacatctatataaataagcccagtacattgtttgatata

SEQ ID NO: 2320 - DNA, 79 bp, synthetic construct
  misc_feature 1..79: note = Description of Artificial Sequence: Synthetic oligonucleotide
  source 1..79: mol_type = other DNA
taacaagtgaaatacccatgctgagtctgaggtgctataggacatctatataaataagcccagtacattgtttgatata

SEQ ID NO: 2321 - DNA, 69 bp, synthetic construct
  misc_feature 1..69: note = Description of Artificial Sequence: Synthetic oligonucleotide
  source 1..69: mol_type = other DNA
tagtataacaagtgaaatacccatgctgagtctgaggtgcctatataaataagcccagtacattgtttg

SEQ ID NO: 2322 - DNA, 79 bp, synthetic construct
  misc_feature 1..79: note = Description of Artificial Sequence: Synthetic oligonucleotide
  source 1..79: mol_type = other DNA
tagtataacaagtgaaatacccatgctgagtctgaggtgcctatagacatctatataaataagcccagtacattgtttg

SEQ ID NO: 2323 - DNA, 79 bp, synthetic construct
  misc_feature 1..79: note = Description of Artificial Sequence: Synthetic oligonucleotide
  source 1..79: mol_type = other DNA
tagtataacaagtgaaatacccatgctgagtctgaggtgcctatggacatctatataaataagcccagtacattgtttg

SEQ ID NO: 2324 - DNA, 81 bp, synthetic construct
  misc_feature 1..81: note = Description of Artificial Sequence: Synthetic oligonucleotide
  source 1..81: mol_type = other DNA
tagtataacaagtgaaatacccatgctgagtctgaggtgcctatagggacatctatataaataagcccagtacattgtttg

SEQ ID NO: 2325 - DNA, 81 bp, synthetic construct
  misc_feature 1..81: note = Description of Artificial Sequence: Synthetic oligonucleotide
  source 1..81: mol_type = other DNA
tagtataacaagtgaaatacccatgctgagtctgaggtgcctataaggacatctatataaataagcccagtacattgtttg

SEQ ID NO: 2326 - DNA, 78 bp, synthetic construct
  misc_feature 1..78: note = Description of Artificial Sequence: Synthetic oligonucleotide
  source 1..78: mol_type = other DNA
tcagaggttagaaatcagagttgggaattgggattacaggctgtatttaagagtttagatataactgtgaatccaaga

SEQ ID NO: 2327 - DNA, 81 bp, synthetic construct
  misc_feature 1..81: note = Description of Artificial Sequence: Synthetic oligonucleotide
  source 1..81: mol_type = other DNA
tcagaggttagaaatcagagttgggaattgggattaatacaggctgtatttaagagtttagatataactgtgaatccaaga

SEQ ID NO: 2328 - DNA, 79 bp, synthetic construct
  misc_feature 1..79: note = Description of Artificial Sequence: Synthetic oligonucleotide
  source 1..79: mol_type = other DNA
tcagaggttagaaatcagagttgggaattgggatttacaggctgtatttaagagtttagatataactgtgaatccaaga

SEQ ID NO: 2329 - DNA, 81 bp, synthetic construct
  misc_feature 1..81: note = Description of Artificial Sequence: Synthetic oligonucleotide
  source 1..81: mol_type = other DNA
tcagaggttagaaatcagagttgggaattgggattattacaggctgtatttaagagtttagatataactgtgaatccaaga

SEQ ID NO: 2330 - DNA, 82 bp, synthetic construct
  misc_feature 1..82: note = Description of Artificial Sequence: Synthetic oligonucleotide
  source 1..82: mol_type = other DNA
tcagaggttagaaatcagagttgggaattgggattaaatacaggctgtatttaagagtttagatataactgtgaatccaaga

SEQ ID NO: 2331 - DNA, 79 bp, synthetic construct
  misc_feature 1..79: note = Description of Artificial Sequence: Synthetic oligonucleotide
  source 1..79: mol_type = other DNA
tgtaaggaggatgagccacatggtatgggaggtatctaaggactctagggtcagagaaatatgggttatatccttctac

SEQ ID NO: 2332 - DNA, 70 bp, synthetic construct
  misc_feature 1..70: note = Description of Artificial Sequence: Synthetic oligonucleotide
  source 1..70: mol_type = other DNA
tgtaaggaggatgagccacatggtatgggaggactctagggtcagagaaatatgggttatatccttctac

SEQ ID NO: 2333 - DNA, 67 bp, synthetic construct
  misc_feature 1..67: note = Description of Artificial Sequence: Synthetic oligonucleotide
  source 1..67: mol_type = other DNA
tgtaaggaggatgagccacatggtatgggactctagggtcagagaaatatgggttatatccttctac

SEQ ID NO: 2334 - DNA, 81 bp, synthetic construct
  misc_feature 1..81: note = Description of Artificial Sequence: Synthetic oligonucleotide
  source 1..81: mol_type = other DNA
tgtaaggaggatgagccacatggtatgggaggtataactaaggactctagggtcagagaaatatgggttatatccttctac

SEQ ID NO: 2335 - DNA, 75 bp, synthetic construct
  misc_feature 1..75: note = Description of Artificial Sequence: Synthetic oligonucleotide
  source 1..75: mol_type = other DNA
tgtaaggaggatgagccacatggtatgggaggtaaggactctagggtcagagaaatatgggttatatccttctac

SEQ ID NO: 2336 - DNA, 81 bp, synthetic construct
  misc_feature 1..81: note = Description of Artificial Sequence: Synthetic oligonucleotide
  source 1..81: mol_type = other DNA
gatgagccacatggtatgggaggtatactaaggacttctagggtcagagaaatatgggttatatccttctacaaaattcac

SEQ ID NO: 2337 - DNA, 71 bp, synthetic construct
  misc_feature 1..71: note = Description of Artificial Sequence: Synthetic oligonucleotide
  source 1..71: mol_type = other DNA
gatgagccacatggtatgggaggtatactagggtcagagaaatatgggttatatccttctacaaaattcac

SEQ ID NO: 2338 - DNA, 72 bp, synthetic construct
  misc_feature 1..72: note = Description of Artificial Sequence: Synthetic oligonucleotide
  source 1..72: mol_type = other DNA
gatgagccacatggtatgggaggtatactaagggtcagagaaatatgggttatatccttctacaaaattcac

SEQ ID NO: 2339 - DNA, 78 bp, synthetic construct
  misc_feature 1..78: note = Description of Artificial Sequence: Synthetic oligonucleotide
  source 1..78: mol_type = other DNA
gatgagccacatggtatgggaggtatactaaggactagggtcagagaaatatgggttatatccttctacaaaattcac

SEQ ID NO: 2340 - DNA, 71 bp, synthetic construct
  misc_feature 1..71: note = Description of Artificial Sequence: Synthetic oligonucleotide
  source 1..71: mol_type = other DNA
gatgagccacatggtatgggaggtatactaaggtcagagaaatatgggttatatccttctacaaaattcac

SEQ ID NO: 2341 - RNA, 36 nt, synthetic construct; identical to SEQ ID NO: 2003
  misc_feature 1..36: note = Description of Artificial Sequence: Synthetic oligonucleotide
  misc_difference 1..20: note = modified_base - a, c, u, g, unknown or other
  source 1..36: mol_type = other RNA

SEQ ID NO: 2342 - RNA, 36 nt, synthetic construct; identical to SEQ ID NO: 2003
  misc_feature 1..36: note = Description of Artificial Sequence: Synthetic oligonucleotide
  misc_difference 1..20: note = modified_base - a, c, u, g, unknown or other
  source 1..36: mol_type = other RNA

SEQ ID NO: 2343 - RNA, 36 nt, synthetic construct; identical to SEQ ID NO: 2003
  misc_feature 1..36: note = Description of Artificial Sequence: Synthetic oligonucleotide
  misc_difference 1..20: note = modified_base - a, c, u, g, unknown or other
  source 1..36: mol_type = other RNA

SEQ ID NO: 2344 - RNA, 36 nt, synthetic construct; identical to SEQ ID NO: 2003
  misc_feature 1..36: note = Description of Artificial Sequence: Synthetic oligonucleotide
  misc_difference 1..20: note = modified_base - a, c, u, g, unknown or other
  source 1..36: mol_type = other RNA

SEQ ID NO: 2345 - RNA, 36 nt, synthetic construct; identical to SEQ ID NO: 2003
  misc_feature 1..36: note = Description of Artificial Sequence: Synthetic oligonucleotide
  misc_difference 1..20: note = modified_base - a, c, u, g, unknown or other
  source 1..36: mol_type = other RNA

SEQ ID NO: 2346 - DNA, 79 bp, synthetic construct
  misc_feature 1..79: note = Description of Artificial Sequence: Synthetic oligonucleotide
  source 1..79: mol_type = other DNA
ttctgtcatgtgtgtcttgactcagaaaccctgttctcctctaatatctccccaccgcatctctttcagcagttgtttc

SEQ ID NO: 2347 - DNA, 67 bp, synthetic construct
  misc_feature 1..67: note = Description of Artificial Sequence: Synthetic oligonucleotide
  source 1..67: mol_type = other DNA
ttctgtcatgtgtgtcttgactcagaaaccctgttctccccaccgcatctctttcagcagttgtttc

SEQ ID NO: 2348 - DNA, 76 bp, synthetic construct
  misc_feature 1..76: note = Description of Artificial Sequence: Synthetic oligonucleotide
  source 1..76: mol_type = other DNA
ttctgtcatgtgtgtcttgactcagaaaccctgttctcctctatctccccaccgcatctctttcagcagttgtttc

SEQ ID NO: 2349 - DNA, 78 bp, synthetic construct
  misc_feature 1..78: note = Description of Artificial Sequence: Synthetic oligonucleotide
  source 1..78: mol_type = other DNA
ttctgtcatgtgtgtcttgactcagaaaccctgttctcctctatatctccccaccgcatctctttcagcagttgtttc

SEQ ID NO: 2350 - DNA, 67 bp, synthetic construct
  misc_feature 1..67: note = Description of Artificial Sequence: Synthetic oligonucleotide
  source 1..67: mol_type = other DNA
ttctgtcatgtgtgtcttgactcagaaaccctgttctcctcaccgcatctctttcagcagttgtttc

SEQ ID NO: 2351 - DNA, 67 bp, synthetic construct; identical to SEQ ID NO: 2347
  misc_feature 1..67: note = Description of Artificial Sequence: Synthetic oligonucleotide
  source 1..67: mol_type = other DNA

SEQ ID NO: 2352 - DNA, 79 bp, synthetic construct; identical to SEQ ID NO: 2346
  misc_feature 1..79: note = Description of Artificial Sequence: Synthetic oligonucleotide
  source 1..79: mol_type = other DNA

SEQ ID NO: 2353 - DNA, 78 bp, synthetic construct; identical to SEQ ID NO: 2349
  misc_feature 1..78: note = Description of Artificial Sequence: Synthetic oligonucleotide
  source 1..78: mol_type = other DNA

SEQ ID NO: 2354 - DNA, 76 bp, synthetic construct; identical to SEQ ID NO: 2348
  misc_feature 1..76: note = Description of Artificial Sequence: Synthetic oligonucleotide
  source 1..76: mol_type = other DNA

SEQ ID NO: 2355 - DNA, 67 bp, synthetic construct; identical to SEQ ID NO: 2350
  misc_feature 1..67: note = Description of Artificial Sequence: Synthetic oligonucleotide
  source 1..67: mol_type = other DNA

SEQ ID NO: 2356 - DNA, 67 bp, synthetic construct
  misc_feature 1..67: note = Description of Artificial Sequence: Synthetic oligonucleotide
  source 1..67: mol_type = other DNA
tcttgactcagaaaccctgttctcctctacatatctctttcagcagttgtttctaaaaatatcctcc

SEQ ID NO: 2357 - DNA, 79 bp, synthetic construct
  misc_feature 1..79: note = Description of Artificial Sequence: Synthetic oligonucleotide
  source 1..79: mol_type = other DNA
tcttgactcagaaaccctgttctcctctacatatctccccacccatctctttcagcagttgtttctaaaaatatcctcc

SEQ ID NO: 2358 - DNA, 78 bp, synthetic construct
  misc_feature 1..78: note = Description of Artificial Sequence: Synthetic oligonucleotide
  source 1..78: mol_type = other DNA
tcttgactcagaaaccctgttctcctctacatatctccccaccatctctttcagcagttgtttctaaaaatatcctcc

SEQ ID NO: 2359 - DNA, 81 bp, synthetic construct
  misc_feature 1..81: note = Description of Artificial Sequence: Synthetic oligonucleotide
  source 1..81: mol_type = other DNA
tcttgactcagaaaccctgttctcctctacatatctccccaccggcatctctttcagcagttgtttctaaaaatatcctcc

SEQ ID NO: 2360 - DNA, 75 bp, synthetic construct
  misc_feature 1..75: note = Description of Artificial Sequence: Synthetic oligonucleotide
  source 1..75: mol_type = other DNA
tcttgactcagaaaccctgttctcctctacatatctccccatctctttcagcagttgtttctaaaaatatcctcc

SEQ ID NO: 2361 - DNA, 67 bp, synthetic construct; identical to SEQ ID NO: 2356
  misc_feature 1..67: note = Description of Artificial Sequence: Synthetic oligonucleotide
  source 1..67: mol_type = other DNA

SEQ ID NO: 2362 - DNA, 79 bp, synthetic construct; identical to SEQ ID NO: 2357
  misc_feature 1..79: note = Description of Artificial Sequence: Synthetic oligonucleotide
  source 1..79: mol_type = other DNA

SEQ ID NO: 2363 - DNA, 78 bp, synthetic construct; identical to SEQ ID NO: 2358
  misc_feature 1..78: note = Description of Artificial Sequence: Synthetic oligonucleotide
  source 1..78: mol_type = other DNA

SEQ ID NO: 2364 - DNA, 81 bp, synthetic construct; identical to SEQ ID NO: 2359
  misc_feature 1..81: note = Description of Artificial Sequence: Synthetic oligonucleotide
  source 1..81: mol_type = other DNA

SEQ ID NO: 2365 - DNA, 79 bp, synthetic construct
  misc_feature 1..79: note = Description of Artificial Sequence: Synthetic oligonucleotide
  source 1..79: mol_type = other DNA
tcttgactcagaaaccctgttctcctctacatatctccccacgcatctctttcagcagttgtttctaaaaatatcctcc

SEQ ID NO: 2366 - DNA, 79 bp, synthetic construct
  misc_feature 1..79: note = Description of Artificial Sequence: Synthetic oligonucleotide
  source 1..79: mol_type = other DNA
cctagtttcatttttgcagaagtgttttaggctaattagtggaatgtatcttagagtttaacttatttgtttctgtcac

SEQ ID NO: 2367 - DNA, 78 bp, synthetic construct
  misc_feature 1..78: note = Description of Artificial Sequence: Synthetic oligonucleotide
  source 1..78: mol_type = other DNA
cctagtttcatttttgcagaagtgttttaggctaatagtggaatgtatcttagagtttaacttatttgtttctgtcac

SEQ ID NO: 2368 - DNA, 70 bp, synthetic construct
  misc_feature 1..70: note = Description of Artificial Sequence: Synthetic oligonucleotide
  source 1..70: mol_type = other DNA
cctagtttcatttttgcagaagtgttttagtggaatgtatcttagagtttaacttatttgtttctgtcac

SEQ ID NO: 2369 - DNA, 81 bp, synthetic construct
  misc_feature 1..81: note = Description of Artificial Sequence: Synthetic oligonucleotide
  source 1..81: mol_type = other DNA
cctagtttcatttttgcagaagtgttttaggctaataatagtggaatgtatcttagagtttaacttatttgtttctgtcac

SEQ ID NO: 2370 - DNA, 79 bp, synthetic construct
  misc_feature 1..79: note = Description of Artificial Sequence: Synthetic oligonucleotide
  source 1..79: mol_type = other DNA
cctagtttcatttttgcagaagtgttttaggctaataagtggaatgtatcttagagtttaacttatttgtttctgtcac

SEQ ID NO: 2371 - DNA, 78 bp, synthetic construct; identical to SEQ ID NO: 2367
  misc_feature 1..78: note = Description of Artificial Sequence: Synthetic oligonucleotide
  source 1..78: mol_type = other DNA

SEQ ID NO: 2372 - DNA, 79 bp, synthetic construct; identical to SEQ ID NO: 2366
  misc_feature 1..79: note = Description of Artificial Sequence: Synthetic oligonucleotide
  source 1..79: mol_type = other DNA

SEQ ID NO: 2373 - DNA, 70 bp, synthetic construct; identical to SEQ ID NO: 2368
  misc_feature 1..70: note = Description of Artificial Sequence: Synthetic oligonucleotide
  source 1..70: mol_type = other DNA

SEQ ID NO: 2374 - DNA, 79 bp, synthetic construct; identical to SEQ ID NO: 2370
  misc_feature 1..79: note = Description of Artificial Sequence: Synthetic oligonucleotide
  source 1..79: mol_type = other DNA

SEQ ID NO: 2375 - DNA, 68 bp, synthetic construct
  misc_feature 1..68: note = Description of Artificial Sequence: Synthetic oligonucleotide
  source 1..68: mol_type = other DNA
cctagtttcatttttgcagaagtgttttaggaatgtatcttagagtttaacttatttgtttctgtcac

SEQ ID NO: 2376 - DNA, 79 bp, synthetic construct
  misc_feature 1..79: note = Description of Artificial Sequence: Synthetic oligonucleotide
  source 1..79: mol_type = other DNA
tagagatttttgtctccaagggaattttgagaggttgaatggacaaatctattgctgcagtttaaacttgcttgcttcc

SEQ ID NO: 2377 - DNA, 75 bp, synthetic construct
  misc_feature 1..75: note = Description of Artificial Sequence: Synthetic oligonucleotide
  source 1..75: mol_type = other DNA
tagagatttttgtctccaagggaattttgagaggttggacaaatctattgctgcagtttaaacttgcttgcttcc

SEQ ID NO: 2378 - DNA, 71 bp, synthetic construct
  misc_feature 1..71: note = Description of Artificial Sequence: Synthetic oligonucleotide
  source 1..71: mol_type = other DNA
tagagatttttgtctccaagggaattttgaatggacaaatctattgctgcagtttaaacttgcttgcttcc

SEQ ID NO: 2379 - DNA, 71 bp, synthetic construct
  misc_feature 1..71: note = Description of Artificial Sequence: Synthetic oligonucleotide
  source 1..71: mol_type = other DNA
tagagatttttgtctccaagggaattttgagaggacaaatctattgctgcagtttaaacttgcttgcttcc

SEQ ID NO: 2380 - DNA, 81 bp, synthetic construct
  misc_feature 1..81: note = Description of Artificial Sequence: Synthetic oligonucleotide
  source 1..81: mol_type = other DNA
tagagatttttgtctccaagggaattttgagaggttgggaatggacaaatctattgctgcagtttaaacttgcttgcttcc

SEQ ID NO: 2381 - DNA, 79 bp, synthetic construct; identical to SEQ ID NO: 2376
  misc_feature 1..79: note = Description of Artificial Sequence: Synthetic oligonucleotide
  source 1..79: mol_type = other DNA

SEQ ID NO: 2382 - DNA, 71 bp, synthetic construct; identical to SEQ ID NO: 2379
  misc_feature 1..71: note = Description of Artificial Sequence: Synthetic oligonucleotide
  source 1..71: mol_type = other DNA

SEQ ID NO: 2383 - DNA, 75 bp, synthetic construct; identical to SEQ ID NO: 2377
  misc_feature 1..75: note = Description of Artificial Sequence: Synthetic oligonucleotide
  source 1..75: mol_type = other DNA

SEQ ID NO: 2384 - DNA, 81 bp, synthetic construct; identical to SEQ ID NO: 2380
  misc_feature 1..81: note = Description of Artificial Sequence: Synthetic oligonucleotide
  source 1..81: mol_type = other DNA

SEQ ID NO: 2385 - DNA, 71 bp, synthetic construct; identical to SEQ ID NO: 2378
  misc_feature 1..71: note = Description of Artificial Sequence: Synthetic oligonucleotide
  source 1..71: mol_type = other DNA

SEQ ID NO: 2386 - DNA, 79 bp, synthetic construct
  misc_feature 1..79: note = Description of Artificial Sequence: Synthetic oligonucleotide
  source 1..79: mol_type = other DNA
gagaaaggaaggaaggaagaggggaagagagaggatgaagggatggaggagaagaaggaaaaataaataatggagagga

SEQ ID NO: 2387 - DNA, 71 bp, synthetic construct
  misc_feature 1..71: note = Description of Artificial Sequence: Synthetic oligonucleotide
  source 1..71: mol_type = other DNA
gagaaaggaaggaaggaagaggggaagagagaggatggaggagaagaaggaaaaataaataatggagagga

SEQ ID NO: 2388 - DNA, 72 bp, synthetic construct
  misc_feature 1..72: note = Description of Artificial Sequence: Synthetic oligonucleotide
  source 1..72: mol_type = other DNA
gagaaaggaaggaaggaagaggggaagagagagggatggaggagaagaaggaaaaataaataatggagagga

SEQ ID NO: 2389 - DNA, 81 bp, synthetic construct
  misc_feature 1..81: note = Description of Artificial Sequence: Synthetic oligonucleotide
  source 1..81: mol_type = other DNA
gagaaaggaaggaaggaagaggggaagagagaggatgggaagggatggaggagaagaaggaaaaataaataatggagagga

SEQ ID NO: 2390 - DNA, 76 bp, synthetic construct
  misc_feature 1..76: note = Description of Artificial Sequence: Synthetic oligonucleotide
  source 1..76: mol_type = other DNA
gagaaaggaaggaaggaagaggggaagagagaggaagggatggaggagaagaaggaaaaataaataatggagagga

SEQ ID NO: 2391 - DNA, 71 bp, synthetic construct; identical to SEQ ID NO: 2387
  misc_feature 1..71: note = Description of Artificial Sequence: Synthetic oligonucleotide
  source 1..71: mol_type = other DNA

SEQ ID NO: 2392 - DNA, 79 bp, synthetic construct; identical to SEQ ID NO: 2386
  misc_feature 1..79: note = Description of Artificial Sequence: Synthetic oligonucleotide
  source 1..79: mol_type = other DNA

SEQ ID NO: 2393 - DNA, 71 bp, synthetic construct
  misc_feature 1..71: note = Description of Artificial Sequence: Synthetic oligonucleotide
  source 1..71: mol_type = other DNA
gagaaaggaaggaaggaagaggggaagagaagggatggaggagaagaaggaaaaataaataatggagagga

SEQ ID NO: 2394 - DNA, 76 bp, synthetic construct; identical to SEQ ID NO: 2390
  misc_feature 1..76: note = Description of Artificial Sequence: Synthetic oligonucleotide
  source 1..76: mol_type = other DNA

SEQ ID NO: 2395 - DNA, 72 bp, synthetic construct; identical to SEQ ID NO: 2388
  misc_feature 1..72: note = Description of Artificial Sequence: Synthetic oligonucleotide
  source 1..72: mol_type = other DNA

SEQ ID NO: 2396 - DNA, 78 bp, synthetic construct
  misc_feature 1..78: note = Description of Artificial Sequence: Synthetic oligonucleotide
  source 1..78: mol_type = other DNA
gagaaagagaaagggaagggaagagaggaaagaagaagaggagagaaaagaaacgaagagaggggaagggaaggaaaa

SEQ ID NO: 2397 - DNA, 75 bp, synthetic construct
  misc_feature 1..75: note = Description of Artificial Sequence: Synthetic oligonucleotide
  source 1..75: mol_type = other DNA
gagaaagagaaagggaagggaagagaggaaagaagaggagagaaaagaaacgaagagaggggaagggaaggaaaa

SEQ ID NO: 2398 - DNA, 65 bp, synthetic construct
  misc_feature 1..65: note = Description of Artificial Sequence: Synthetic oligonucleotide
  source 1..65: mol_type = other DNA
gagaaagagaaagggaagggaagagaggagagaaaagaaacgaagagaggggaagggaaggaaaa

SEQ ID NO: 2399 - DNA, 60 bp, synthetic construct
  misc_feature 1..60: note = Description of Artificial Sequence: Synthetic oligonucleotide
  source 1..60: mol_type = other DNA
gagaaagagaaagggaagggaagagaggaaagaaacgaagagaggggaagggaaggaaaa

SEQ ID NO: 2400 - DNA, 72 bp, synthetic construct
  misc_feature 1..72: note = Description of Artificial Sequence: Synthetic oligonucleotide
  source 1..72: mol_type = other DNA
gagaaagagaaagggaagggaagagaggaaagaggagagaaaagaaacgaagagaggggaagggaaggaaaa

SEQ ID NO: 2401 - DNA, 75 bp, synthetic construct; identical to SEQ ID NO: 2397
  misc_feature 1..75: note = Description of Artificial Sequence: Synthetic oligonucleotide
  source 1..75: mol_type = other DNA

SEQ ID NO: 2402 - DNA, 78 bp, synthetic construct; identical to SEQ ID NO: 2396
  misc_feature 1..78: note = Description of Artificial Sequence: Synthetic oligonucleotide
  source 1..78: mol_type = other DNA

SEQ ID NO: 2403 - DNA, 65 bp, synthetic construct; identical to SEQ ID NO: 2398
  misc_feature 1..65: note = Description of Artificial Sequence: Synthetic oligonucleotide
  source 1..65: mol_type = other DNA

SEQ ID NO: 2404 - DNA, 81 bp, synthetic construct
  misc_feature 1..81: note = Description of Artificial Sequence: Synthetic oligonucleotide
  source 1..81: mol_type = other DNA
gagaaagagaaagggaagggaagagaggaaagaagaggaagaggagagaaaagaaacgaagagaggggaagggaaggaaaa

SEQ ID NO: 2405 - DNA, 60 bp, synthetic construct
  misc_feature 1..60: note = Description of Artificial Sequence: Synthetic oligonucleotide
  source 1..60: mol_type = other DNA
gagaaagagaaagggaagggaggagagaaaagaaacgaagagaggggaagggaaggaaaa

SEQ ID NO: 2406 - DNA, 73 bp, synthetic construct
  misc_feature 1..73: note = Description of Artificial Sequence: Synthetic oligonucleotide
  source 1..73: mol_type = other DNA
aaatgcttatgacagcaataatcataaaaacctcaaaccacttaaatgcttaccaacagtagaattgataaat

SEQ ID NO: 2407 - DNA, 81 bp, synthetic construct
  misc_feature 1..81: note = Description of Artificial Sequence: Synthetic oligonucleotide
  source 1..81: mol_type = other DNA
aaatgcttatgacagcaataatcataaaaacctcaaaccggtaggccacttaaatgcttaccaacagtagaattgataaat

SEQ ID NO: 2408 - DNA, 81 bp, synthetic construct
  misc_feature 1..81: note = Description of Artificial Sequence: Synthetic oligonucleotide
  source 1..81: mol_type = other DNA
aaatgcttatgacagcaataatcataaaaacctcaaaccggtaagccacttaaatgcttaccaacagtagaattgataaat

SEQ ID NO: 2409 - DNA, 72 bp, synthetic construct
  misc_feature 1..72: note = Description of Artificial Sequence: Synthetic oligonucleotide
  source 1..72: mol_type = other DNA
aaatgcttatgacagcaataatcataaaaacctcagccacttaaatgcttaccaacagtagaattgataaat

SEQ ID NO: 2410 - DNA, 66 bp, synthetic construct
  misc_feature 1..66: note = Description of Artificial Sequence: Synthetic oligonucleotide
  source 1..66: mol_type = other DNA
aaatgcttatgacagcaataatcataaaaaccacttaaatgcttaccaacagtagaattgataaat

SEQ ID NO: 2411 - DNA, 73 bp, synthetic construct; identical to SEQ ID NO: 2406
  misc_feature 1..73: note = Description of Artificial Sequence: Synthetic oligonucleotide
  source 1..73: mol_type = other DNA

SEQ ID NO: 2412 - DNA, 81 bp, synthetic construct; identical to SEQ ID NO: 2407
  misc_feature 1..81: note = Description of Artificial Sequence: Synthetic oligonucleotide
  source 1..81: mol_type = other DNA

SEQ ID NO: 2413 - DNA, 81 bp, synthetic construct; identical to SEQ ID NO: 2408
  misc_feature 1..81: note = Description of Artificial Sequence: Synthetic oligonucleotide
  source 1..81: mol_type = other DNA

SEQ ID NO: 2414 - DNA, 72 bp, synthetic construct
  misc_feature 1..72: note = Description of Artificial Sequence: Synthetic oligonucleotide
  source 1..72: mol_type = other DNA
aaatgcttatgacagcaataatcataaaaacctcaaaccggtaaatgcttaccaacagtagaattgataaat

SEQ ID NO: 2415 - DNA, 73 bp, synthetic construct
  misc_feature 1..73: note = Description of Artificial Sequence: Synthetic oligonucleotide
  source 1..73: mol_type = other DNA
aaatgcttatgacagcaataatcataaaaacctcaaaccggttaaatgcttaccaacagtagaattgataaat

SEQ ID NO: 2416 - DNA, 81 bp, synthetic construct
  misc_feature 1..81: note = Description of Artificial Sequence: Synthetic oligonucleotide
  source 1..81: mol_type = other DNA
aaatgcattttacagcatttggttgattaaaagtaacccagaggtgagttcaaactatatgactttatttgtatatagaaa

SEQ ID NO: 2417 - DNA, 73 bp, synthetic construct
  misc_feature 1..73: note = Description of Artificial Sequence: Synthetic oligonucleotide
  source 1..73: mol_type = other DNA
aaatgcattttacagcatttggttgattaaaagaggtgagttcaaactatatgactttatttgtatatagaaa

SEQ ID NO: 2418 - DNA, 79 bp, synthetic construct
  misc_feature 1..79: note = Description of Artificial Sequence: Synthetic oligonucleotide
  source 1..79: mol_type = other DNA
aaatgcattttacagcatttggttgattaaaagtaacagaggtgagttcaaactatatgactttatttgtatatagaaa

SEQ ID NO: 2419 - DNA, 71 bp, synthetic construct
  misc_feature 1..71: note = Description of Artificial Sequence: Synthetic oligonucleotide
  source 1..71: mol_type = other DNA
aaatgcattttacagcatttggttgattaaaaggtgagttcaaactatatgactttatttgtatatagaaa

SEQ ID NO: 2420 - DNA, 60 bp, synthetic construct
  misc_feature 1..60: note = Description of Artificial Sequence: Synthetic oligonucleotide
  source 1..60: mol_type = other DNA
aaatgcattttacagcatttggttgagttcaaactatatgactttatttgtatatagaaa

SEQ ID NO: 2421 - DNA, 81 bp, synthetic construct; identical to SEQ ID NO: 2416
  misc_feature 1..81: note = Description of Artificial Sequence: Synthetic oligonucleotide
  source 1..81: mol_type = other DNA

SEQ ID NO: 2422 - DNA, 73 bp, synthetic construct; identical to SEQ ID NO: 2417
  misc_feature 1..73: note = Description of Artificial Sequence: Synthetic oligonucleotide
  source 1..73: mol_type = other DNA

SEQ ID NO: 2423 - DNA, 79 bp, synthetic construct; identical to SEQ ID NO: 2418
  misc_feature 1..79: note = Description of Artificial Sequence: Synthetic oligonucleotide
  source 1..79: mol_type = other DNA

SEQ ID NO: 2424 - DNA, 71 bp, synthetic construct; identical to SEQ ID NO: 2419
  misc_feature 1..71: note = Description of Artificial Sequence: Synthetic oligonucleotide
  source 1..71: mol_type = other DNA

SEQ ID NO: 2425 - DNA, 60 bp, synthetic construct; identical to SEQ ID NO: 2420
  misc_feature 1..60: note = Description of Artificial Sequence: Synthetic oligonucleotide
  source 1..60: mol_type = other DNA

SEQ ID NO: 2426 - DNA, 81 bp, synthetic construct
  misc_feature 1..81: note = Description of Artificial Sequence: Synthetic oligonucleotide
  source 1..81: mol_type = other DNA
cctggaagccaacgaaagatattgaataattcaagaaaaggtggtggcatggtttgatttgtgtctttaaaagattattct

SEQ ID NO: 2427 - DNA, 76 bp, synthetic construct
  misc_feature 1..76: note = Description of Artificial Sequence: Synthetic oligonucleotide
  source 1..76: mol_type = other DNA
cctggaagccaacgaaagatattgaataattcaaggtggtggcatggtttgatttgtgtctttaaaagattattct

SEQ ID NO: 2428 - DNA, 79 bp, synthetic construct
  misc_feature 1..79: note = Description of Artificial Sequence: Synthetic oligonucleotide
  source 1..79: mol_type = other DNA
cctggaagccaacgaaagatattgaataattcaagaaggtggtggcatggtttgatttgtgtctttaaaagattattct

SEQ ID NO: 2429 - DNA, 78 bp, synthetic construct
  misc_feature 1..78: note = Description of Artificial Sequence: Synthetic oligonucleotide
  source 1..78: mol_type = other DNA
cctggaagccaacgaaagatattgaataattcaagaggtggtggcatggtttgatttgtgtctttaaaagattattct

SEQ ID NO: 2430 - DNA, 75 bp, synthetic construct
  misc_feature 1..75: note = Description of Artificial Sequence: Synthetic oligonucleotide
  source 1..75: mol_type = other DNA
cctggaagccaacgaaagatattgaataattcaggtggtggcatggtttgatttgtgtctttaaaagattattct

SEQ ID NO: 2431 - DNA, 81 bp, synthetic construct; identical to SEQ ID NO: 2426
  misc_feature 1..81: note = Description of Artificial Sequence: Synthetic oligonucleotide
  source 1..81: mol_type = other DNA

SEQ ID NO: 2432 - DNA, 76 bp, synthetic construct; identical to SEQ ID NO: 2427
  misc_feature 1..76: note = Description of Artificial Sequence: Synthetic oligonucleotide
  source 1..76: mol_type = other DNA

SEQ ID NO: 2433 - DNA, 79 bp, synthetic construct; identical to SEQ ID NO: 2428
  misc_feature 1..79: note = Description of Artificial Sequence: Synthetic oligonucleotide
  source 1..79: mol_type = other DNA

SEQ ID NO: 2434 - DNA, 78 bp, synthetic construct; identical to SEQ ID NO: 2429
  misc_feature 1..78: note = Description of Artificial Sequence: Synthetic oligonucleotide
  source 1..78: mol_type = other DNA

SEQ ID NO: 2435 - DNA, 82 bp, synthetic construct
  misc_feature 1..82: note = Description of Artificial Sequence: Synthetic oligonucleotide
  source 1..82: mol_type = other DNA
cctggaagccaacgaaagatattgaataattcaagaacaaggtggtggcatggtttgatttgtgtctttaaaagattattct

SEQ ID NO: 2436 - DNA, 67 bp, synthetic construct
  misc_feature 1..67: note = Description of Artificial Sequence: Synthetic oligonucleotide
  source 1..67: mol_type = other DNA
ccttggcctcccaaagtgctgggtttacaagcctgagccaggataaggtctaaaagtggaaagaata

SEQ ID NO: 2437 - DNA, 79 bp, synthetic construct
  misc_feature 1..79: note = Description of Artificial Sequence: Synthetic oligonucleotide
  source 1..79: mol_type = other DNA
ccttggcctcccaaagtgctgggtttacaagcctgagccacccatccagccaggataaggtctaaaagtggaaagaata

SEQ ID NO: 2438 - DNA, 75 bp, synthetic construct
  misc_feature 1..75: note = Description of Artificial Sequence: Synthetic oligonucleotide
  source 1..75: mol_type = other DNA
ccttggcctcccaaagtgctgggtttacaagcctgagccatccagccaggataaggtctaaaagtggaaagaata

SEQ ID NO: 2439 - DNA, 79 bp, synthetic construct
  misc_feature 1..79: note = Description of Artificial Sequence: Synthetic oligonucleotide
  source 1..79: mol_type = other DNA
ccttggcctcccaaagtgctgggtttacaagcctgagccaccgatccagccaggataaggtctaaaagtggaaagaata

SEQ ID NO: 2440 - DNA, 74 bp, synthetic construct
  misc_feature 1..74: note = Description of Artificial Sequence: Synthetic oligonucleotide
  source 1..74: mol_type = other DNA
ccttggcctcccaaagtgctgggtttacaagcctgagccaccagccaggataaggtctaaaagtggaaagaata

SEQ ID NO: 2441 - DNA, 67 bp, synthetic construct; identical to SEQ ID NO: 2436
  misc_feature 1..67: note = Description of Artificial Sequence: Synthetic oligonucleotide
  source 1..67: mol_type = other DNA

SEQ ID NO: 2442 - DNA, 79 bp, synthetic construct; identical to SEQ ID NO: 2437
  misc_feature 1..79: note = Description of Artificial Sequence: Synthetic oligonucleotide
  source 1..79: mol_type = other DNA

SEQ ID NO: 2443 - DNA, 79 bp, synthetic construct; identical to SEQ ID NO: 2439
  misc_feature 1..79: note = Description of Artificial Sequence: Synthetic oligonucleotide
  source 1..79: mol_type = other DNA

SEQ ID NO: 2444 - DNA, 78 bp, synthetic construct
  misc_feature 1..78: note = Description of Artificial Sequence: Synthetic oligonucleotide
  source 1..78: mol_type = other DNA
ccttggcctcccaaagtgctgggtttacaagcctgagccaccgtccagccaggataaggtctaaaagtggaaagaata

SEQ ID NO: 2445 - DNA, 74 bp, synthetic construct; identical to SEQ ID NO: 2440
  misc_feature 1..74: note = Description of Artificial Sequence: Synthetic oligonucleotide
  source 1..74: mol_type = other DNA

SEQ ID NO: 2446 - DNA, 74 bp, synthetic construct
  misc_feature 1..74: note = Description of Artificial Sequence: Synthetic oligonucleotide
  source 1..74: mol_type = other DNA
aagtgctgggtttacaagcctgagccaccgcatccagccaggtctaaaagtggaaagaatagcatctactcttg

SEQ ID NO: 2447 - DNA, 81 bp, synthetic construct
  misc_feature 1..81: note = Description of Artificial Sequence: Synthetic oligonucleotide
  source 1..81: mol_type = other DNA
aagtgctgggtttacaagcctgagccaccgcatccagccaggattaaggtctaaaagtggaaagaatagcatctactcttg

SEQ ID NO: 2448 - DNA, 81 bp, synthetic construct
  misc_feature 1..81: note = Description of Artificial Sequence: Synthetic oligonucleotide
  source 1..81: mol_type = other DNA
aagtgctgggtttacaagcctgagccaccgcatccagccaggaataaggtctaaaagtggaaagaatagcatctactcttg

SEQ ID NO: 2449 - DNA, 79 bp, synthetic construct
  misc_feature 1..79: note = Description of Artificial Sequence: Synthetic oligonucleotide
  source 1..79: mol_type = other DNA
aagtgctgggtttacaagcctgagccaccgcatccagccaggaaaggtctaaaagtggaaagaatagcatctactcttg

SEQ ID NO: 2450 - DNA, 75 bp, synthetic construct
  misc_feature 1..75: note = Description of Artificial Sequence: Synthetic oligonucleotide
  source 1..75: mol_type = other DNA
aagtgctgggtttacaagcctgagccaccgcatccagccaggatctaaaagtggaaagaatagcatctactcttg

SEQ ID NO: 2451 - DNA, 74 bp, synthetic construct; identical to SEQ ID NO: 2446
  misc_feature 1..74: note = Description of Artificial Sequence: Synthetic oligonucleotide
  source 1..74: mol_type = other DNA

SEQ ID NO: 2452 - DNA, 81 bp, synthetic construct; identical to SEQ ID NO: 2447
  misc_feature 1..81: note = Description of Artificial Sequence: Synthetic oligonucleotide
  source 1..81: mol_type = other DNA

SEQ ID NO: 2453 - DNA, 81 bp, synthetic construct; identical to SEQ ID NO: 2448
  misc_feature 1..81: note = Description of Artificial Sequence: Synthetic oligonucleotide
  source 1..81: mol_type = other DNA

SEQ ID NO: 2454 - DNA, 79 bp, synthetic construct; identical to SEQ ID NO: 2449
  misc_feature 1..79: note = Description of Artificial Sequence: Synthetic oligonucleotide
  source 1..79: mol_type = other DNA

SEQ ID NO: 2455 - DNA, 75 bp, synthetic construct; identical to SEQ ID NO: 2450
  misc_feature 1..75: note = Description of Artificial Sequence: Synthetic oligonucleotide
  source 1..75: mol_type = other DNA

SEQ ID NO: 2456 - DNA, 76 bp, synthetic construct
  misc_feature 1..76: note = Description of Artificial Sequence: Synthetic oligonucleotide
  source 1..76: mol_type = other DNA
tagcatctactcttgttcaggaaacaatgaggacctgggcagtaagagtggtgattaatagatagggacaaattga

SEQ ID NO: 2457 - DNA, 79 bp, synthetic construct
  misc_feature 1..79: note = Description of Artificial Sequence: Synthetic oligonucleotide
  source 1..79: mol_type = other DNA
tagcatctactcttgttcaggaaacaatgaggacctactgggcagtaagagtggtgattaatagatagggacaaattga

SEQ ID NO: 2458 - DNA, 75 bp, synthetic construct
  misc_feature 1..75: note = Description of Artificial Sequence: Synthetic oligonucleotide
  source 1..75: mol_type = other DNA
tagcatctactcttgttcaggaaacaatgaggactgggcagtaagagtggtgattaatagatagggacaaattga

SEQ ID NO: 2459 - DNA, 69 bp, synthetic construct
  misc_feature 1..69: note = Description of Artificial Sequence: Synthetic oligonucleotide
  source 1..69: mol_type = other DNA
tagcatctactcttgttcaggaaacaatgaggcagtaagagtggtgattaatagatagggacaaattga

SEQ ID NO: 2460 - DNA, 68 bp, synthetic construct
  misc_feature 1..68: note = Description of Artificial Sequence: Synthetic oligonucleotide
  source 1..68: mol_type = other DNA
tagcatctactcttgttcaggaaacaatgggcagtaagagtggtgattaatagatagggacaaattga

SEQ ID NO: 2461 - DNA, 76 bp, synthetic construct; identical to SEQ ID NO: 2456
  misc_feature 1..76: note = Description of Artificial Sequence: Synthetic oligonucleotide
  source 1..76: mol_type = other DNA

SEQ ID NO: 2462 - DNA, 79 bp, synthetic construct; identical to SEQ ID NO: 2457
  misc_feature 1..79: note = Description of Artificial Sequence: Synthetic oligonucleotide
  source 1..79: mol_type = other DNA

SEQ ID NO: 2463 - DNA, 75 bp, synthetic construct; identical to SEQ ID NO: 2458
  misc_feature 1..75: note = Description of Artificial Sequence: Synthetic oligonucleotide
  source 1..75: mol_type = other DNA

SEQ ID NO: 2464 - DNA, 70 bp, synthetic construct
  misc_feature 1..70: note = Description of Artificial Sequence: Synthetic oligonucleotide
  source 1..70: mol_type = other DNA
tagcatctactcttgttcaggaaacaatgaggacagtaagagtggtgattaatagatagggacaaattga

SEQ ID NO: 2465 - DNA, 69 bp, synthetic construct; identical to SEQ ID NO: 2459
  misc_feature 1..69: note = Description of Artificial Sequence: Synthetic oligonucleotide
  source 1..69: mol_type = other DNA

SEQ ID NO: 2466 - RNA, 36 nt, synthetic construct; identical to SEQ ID NO: 2003
  misc_feature 1..36: note = Description of Artificial Sequence: Synthetic oligonucleotide
  misc_difference 1..20: note = modified_base - a, c, u, g, unknown or other
  source 1..36: mol_type = other RNA

SEQ ID NO: 2467 - RNA, 36 nt, synthetic construct; identical to SEQ ID NO: 2003
  misc_feature 1..36: note = Description of Artificial Sequence: Synthetic oligonucleotide
  misc_difference 1..20: note = modified_base - a, c, u, g, unknown or other
  source 1..36: mol_type = other RNA

SEQ ID NO: 2468 - RNA, 36 nt, synthetic construct; identical to SEQ ID NO: 2003
  misc_feature 1..36: note = Description of Artificial Sequence: Synthetic oligonucleotide
  misc_difference 1..20: note = modified_base - a, c, u, g, unknown or other
  source 1..36: mol_type = other RNA

SEQ ID NO: 2469 - RNA, 36 nt, synthetic construct; identical to SEQ ID NO: 2003
  misc_feature 1..36: note = Description of Artificial Sequence: Synthetic oligonucleotide
  misc_difference 1..20: note = modified_base - a, c, u, g, unknown or other
  source 1..36: mol_type = other RNA

SEQ ID NO: 2470 - RNA, 36 nt, synthetic construct
  misc_feature 1..36: note = Description of Artificial Sequence: Synthetic oligonucleotide
  source 1..36: mol_type = other RNA
cacaaacggaaacaatgcaagttttagagctatgct

SEQ ID NO: 2471 - RNA, 100 nt, synthetic construct; identical to SEQ ID NO: 2013
  misc_feature 1..100: note = Description of Artificial Sequence: Synthetic polynucleotide
  misc_difference 1..20: note = modified_base - a, c, u, g, unknown or other
  source 1..100: mol_type = other RNA

SEQ ID NO: 2472 - RNA, 100 nt, synthetic construct; identical to SEQ ID NO: 2013
  misc_feature 1..100: note = Description of Artificial Sequence: Synthetic polynucleotide
  misc_difference 1..20: note = modified_base - a, c, u, g, unknown or other
  source 1..100: mol_type = other RNA

SEQ ID NO: 2473 - RNA, 100 nt, synthetic construct; identical to SEQ ID NO: 2013
  misc_feature 1..100: note = Description of Artificial Sequence: Synthetic polynucleotide
  misc_difference 1..20: note = modified_base - a, c, u, g, unknown or other
  source 1..100: mol_type = other RNA

SEQ ID NO: 2474 - RNA, 42 nt, synthetic construct; identical to SEQ ID NO: 2010
  misc_feature 1..42: note = Description of Artificial Sequence: Synthetic oligonucleotide
  misc_difference 1..20: note = modified_base - a, c, u, g, unknown or other
  source 1..42: mol_type = other RNA

SEQ ID NO: 2475 - RNA, 42 nt, synthetic construct; identical to SEQ ID NO: 2010
  misc_feature 1..42: note = Description of Artificial Sequence: Synthetic oligonucleotide
  misc_difference 1..20: note = modified_base - a, c, u, g, unknown or other
  source 1..42: mol_type = other RNA

SEQ ID NO: 2476 - RNA, 42 nt, synthetic construct; identical to SEQ ID NO: 2010
  misc_feature 1..42: note = Description of Artificial Sequence: Synthetic oligonucleotide
  misc_difference 1..20: note = modified_base - a, c, u, g, unknown or other
  source 1..42: mol_type = other RNA

SEQ ID NO: 2477 - DNA, 75 bp, synthetic construct
  misc_feature 1..75: note = Description of Artificial Sequence: Synthetic oligonucleotide
  source 1..75: mol_type = other DNA
acattcttatttttatcgagcacaaacggaaacaatggcagcctctgcttagaaaaagctgtggataagccacct

SEQ ID NO: 2478 - DNA, 79 bp, synthetic construct
  misc_feature 1..79: note = Description of Artificial Sequence: Synthetic oligonucleotide
  source 1..79: mol_type = other DNA
acattcttatttttatcgagcacaaacggaaacaatgaatggcagcctctgcttagaaaaagctgtggataagccacct

SEQ ID NO: 2479 - DNA, 78 bp, synthetic construct
  misc_feature 1..78: note = Description of Artificial Sequence: Synthetic oligonucleotide
  source 1..78: mol_type = other DNA
acattcttatttttatcgagcacaaacggaaacaatgatggcagcctctgcttagaaaaagctgtggataagccacct

SEQ ID NO: 2480 - DNA, 74 bp, synthetic construct
  misc_feature 1..74: note = Description of Artificial Sequence: Synthetic oligonucleotide
  source 1..74: mol_type = other DNA
acattcttatttttatcgagcacaaacggaaacaatgcagcctctgcttagaaaaagctgtggataagccacct

SEQ ID NO: 2481 - DNA, 79 bp, synthetic construct
  misc_feature 1..79: note = Description of Artificial Sequence: Synthetic oligonucleotide
  source 1..79: mol_type = other DNA
acattcttatttttatcgagcacaaacggaaacaatcaatggcagcctctgcttagaaaaagctgtggataagccacct

SEQ ID NO: 2482 - DNA, 81 bp, synthetic construct
  misc_feature 1..81: note = Description of Artificial Sequence: Synthetic oligonucleotide
  source 1..81: mol_type = other DNA
acattcttatttttatcgagcacaaacggaaacaaatgcaatggcagcctctgcttagaaaaagctgtggataagccacct

SEQ ID NO: 2483 - DNA, 67 bp, synthetic construct; identical to SEQ ID NO: 2347
  misc_feature 1..67: note = Description of Artificial Sequence: Synthetic oligonucleotide
  source 1..67: mol_type = other DNA

SEQ ID NO: 2484 - DNA, 80 bp, synthetic construct
  misc_feature 1..80: note = Description of Artificial Sequence: Synthetic oligonucleotide
  source 1..80: mol_type = other DNA
ttctgtcatgtgtgtcttgactcagaaaccctgttctcctctgcatatctccccaccgcatctctttcagcagttgtttc

SEQ ID NO: 2485 - DNA, 79 bp, synthetic construct; identical to SEQ ID NO: 2346
  misc_feature 1..79: note = Description of Artificial Sequence: Synthetic oligonucleotide
  source 1..79: mol_type = other DNA

SEQ ID NO: 2486 - DNA, 67 bp, synthetic construct; identical to SEQ ID NO: 2350
  misc_feature 1..67: note = Description of Artificial Sequence: Synthetic oligonucleotide
  source 1..67: mol_type = other DNA

SEQ ID NO: 2487 - DNA, 76 bp, synthetic construct; identical to SEQ ID NO: 2348
  misc_feature 1..76: note = Description of Artificial Sequence: Synthetic oligonucleotide
  source 1..76: mol_type = other DNA

SEQ ID NO: 2488 - DNA, 78 bp, synthetic construct; identical to SEQ ID NO: 2349
  misc_feature 1..78: note = Description of Artificial Sequence: Synthetic oligonucleotide
  source 1..78: mol_type = other DNA

SEQ ID NO: 2489 - DNA, 67 bp, synthetic construct; identical to SEQ ID NO: 2347
  misc_feature 1..67: note = Description of Artificial Sequence: Synthetic oligonucleotide
  source 1..67: mol_type = other DNA

SEQ ID NO: 2490 - DNA, 80 bp, synthetic construct; identical to SEQ ID NO: 2484
  misc_feature 1..80: note = Description of Artificial Sequence: Synthetic oligonucleotide
  source 1..80: mol_type = other DNA

SEQ ID NO: 2491 - DNA, 67 bp, synthetic construct; identical to SEQ ID NO: 2350
  misc_feature 1..67: note = Description of Artificial Sequence: Synthetic oligonucleotide
  source 1..67: mol_type = other DNA

SEQ ID NO: 2492 - DNA, 79 bp, synthetic construct; identical to SEQ ID NO: 2346
  misc_feature 1..79: note = Description of Artificial Sequence: Synthetic oligonucleotide
  source 1..79: mol_type = other DNA

SEQ ID NO: 2493 - DNA, 76 bp, synthetic construct; identical to SEQ ID NO: 2348
  misc_feature 1..76: note = Description of Artificial Sequence: Synthetic oligonucleotide
  source 1..76: mol_type = other DNA

SEQ ID NO: 2494 - DNA, 78 bp, synthetic construct; identical to SEQ ID NO: 2349
  misc_feature 1..78: note = Description of Artificial Sequence: Synthetic oligonucleotide
  source 1..78: mol_type = other DNA

SEQ ID NO: 2495 - DNA, 67 bp, synthetic construct; identical to SEQ ID NO: 2347
  misc_feature 1..67: note = Description of Artificial Sequence: Synthetic oligonucleotide
  source 1..67: mol_type = other DNA

SEQ ID NO: 2496 - DNA, 80 bp, synthetic construct; identical to SEQ ID NO: 2484
  misc_feature 1..80: note = Description of Artificial Sequence: Synthetic oligonucleotide
  source 1..80: mol_type = other DNA

SEQ ID NO: 2497 - DNA, 76 bp, synthetic construct; identical to SEQ ID NO: 2348
  misc_feature 1..76: note = Description of Artificial Sequence: Synthetic oligonucleotide
  source 1..76: mol_type = other DNA

SEQ ID NO: 2498 - DNA, 67 bp, synthetic construct; identical to SEQ ID NO: 2350
  misc_feature 1..67: note = Description of Artificial Sequence: Synthetic oligonucleotide
  source 1..67: mol_type = other DNA

SEQ ID NO: 2499 - DNA, 79 bp, synthetic construct; identical to SEQ ID NO: 2346
  misc_feature 1..79: note = Description of Artificial Sequence: Synthetic oligonucleotide
  source 1..79: mol_type = other DNA

SEQ ID NO: 2500 - DNA, 80 bp, synthetic construct
  misc_feature 1..80: note = Description of Artificial Sequence: Synthetic oligonucleotide
  source 1..80: mol_type = other DNA
ttctgtcatgtgtgtcttgactcagaaaccttgttctcctctacatatctccccaccgcatctctttcagcagttgtttc

SEQ ID NO: 2501 - DNA, 67 bp, synthetic construct; identical to SEQ ID NO: 2347
  misc_feature 1..67: note = Description of Artificial Sequence: Synthetic oligonucleotide
  source 1..67: mol_type = other DNA

SEQ ID NO: 2502 - DNA, 80 bp, synthetic construct; identical to SEQ ID NO: 2484
  misc_feature 1..80: note = Description of Artificial Sequence: Synthetic oligonucleotide
  source 1..80: mol_type = other DNA

SEQ ID NO: 2503 - DNA, 79 bp, synthetic construct; identical to SEQ ID NO: 2346
  misc_feature 1..79: note = Description of Artificial Sequence: Synthetic oligonucleotide
  source 1..79: mol_type = other DNA

SEQ ID NO: 2504 - DNA, 67 bp, synthetic construct; identical to SEQ ID NO: 2350
  misc_feature 1..67: note = Description of Artificial Sequence: Synthetic oligonucleotide
  source 1..67: mol_type = other DNA

SEQ ID NO: 2505 - DNA, 76 bp, synthetic construct; identical to SEQ ID NO: 2348
  misc_feature 1..76: note = Description of Artificial Sequence: Synthetic oligonucleotide
  source 1..76: mol_type = other DNA

SEQ ID NO: 2506 - DNA, 78 bp, synthetic construct; identical to SEQ ID NO: 2349
  misc_feature 1..78: note = Description of Artificial Sequence: Synthetic oligonucleotide
  source 1..78: mol_type = other DNA

SEQ ID NO: 2507 - DNA, 67 bp, synthetic construct; identical to SEQ ID NO: 2347
  misc_feature 1..67: note = Description of Artificial Sequence: Synthetic oligonucleotide
  source 1..67: mol_type = other DNA

SEQ ID NO: 2508 - DNA, 67 bp, synthetic construct; identical to SEQ ID NO: 2350
  misc_feature 1..67: note = Description of Artificial Sequence: Synthetic oligonucleotide
  source 1..67: mol_type = other DNA

SEQ ID NO: 2509 - DNA, 80 bp, synthetic construct; identical to SEQ ID NO: 2484
  misc_feature 1..80: note = Description of Artificial Sequence: Synthetic oligonucleotide
  source 1..80: mol_type = other DNA

SEQ ID NO: 2510 - DNA, 76 bp, synthetic construct; identical to SEQ ID NO: 2348
  misc_feature 1..76: note = Description of Artificial Sequence: Synthetic oligonucleotide
  source 1..76: mol_type = other DNA

SEQ ID NO: 2511 - DNA, 78 bp, synthetic construct; identical to SEQ ID NO: 2349
  misc_feature 1..78: note = Description of Artificial Sequence: Synthetic oligonucleotide
  source 1..78: mol_type = other DNA

SEQ ID NO: 2512 - DNA, 79 bp, synthetic construct; identical to SEQ ID NO: 2346
  misc_feature 1..79: note = Description of Artificial Sequence: Synthetic oligonucleotide
  source 1..79: mol_type = other DNA

SEQ ID NO: 2513 - DNA, 67 bp, synthetic construct; identical to SEQ ID NO: 2347
  misc_feature 1..67: note = Description of Artificial Sequence: Synthetic oligonucleotide
  source 1..67: mol_type = other DNA

SEQ ID NO: 2514 - DNA, 80 bp, synthetic construct; identical to SEQ ID NO: 2484
  misc_feature 1..80: note = Description of Artificial Sequence: Synthetic oligonucleotide
  source 1..80: mol_type = other DNA

SEQ ID NO: 2515 - DNA, 79 bp, synthetic construct; identical to SEQ ID NO: 2346
  misc_feature 1..79: note = Description of Artificial Sequence: Synthetic oligonucleotide
  source 1..79: mol_type = other DNA

SEQ ID NO: 2516 - DNA, 78 bp, synthetic construct; identical to SEQ ID NO: 2349
  misc_feature 1..78: note = Description of Artificial Sequence: Synthetic oligonucleotide
  source 1..78: mol_type = other DNA

SEQ ID NO: 2517 - DNA, 67 bp, synthetic construct; identical to SEQ ID NO: 2350
  misc_feature 1..67: note = Description of Artificial Sequence: Synthetic oligonucleotide
  source 1..67: mol_type = other DNA

SEQ ID NO: 2518 - DNA, 76 bp, synthetic construct; identical to SEQ ID NO: 2348
  misc_feature 1..76: note = Description of Artificial Sequence: Synthetic oligonucleotide
  source 1..76: mol_type = other DNA

SEQ ID NO: 2519 - DNA, 67 bp, synthetic construct; identical to SEQ ID NO: 2356
  misc_feature 1..67: note = Description of Artificial Sequence: Synthetic oligonucleotide
  source 1..67: mol_type = other DNA

SEQ ID NO: 2520 - DNA, 80 bp, synthetic construct
  misc_feature 1..80: note = Description of Artificial Sequence: Synthetic oligonucleotide
  source 1..80: mol_type = other DNA
tcttgactcagaaaccctgttctcctctgcatatctccccaccgcatctctttcagcagttgtttctaaaaatatcctcc

SEQ ID NO: 2521 - DNA, 75 bp, synthetic construct; identical to SEQ ID NO: 2360
  misc_feature 1..75: note = Description of Artificial Sequence: Synthetic oligonucleotide
  source 1..75: mol_type = other DNA

SEQ ID NO: 2522 - DNA, 79 bp, synthetic construct; identical to SEQ ID NO: 2357
  misc_feature 1..79: note = Description of Artificial Sequence: Synthetic oligonucleotide
  source 1..79: mol_type = other DNA

SEQ ID NO: 2523 - DNA, 80 bp, synthetic construct
  misc_feature 1..80: note = Description of Artificial Sequence: Synthetic oligonucleotide
  source 1..80: mol_type = other DNA
tcttgactcagaaaccttgttctcctctacatatctccccaccgcatctctttcagcagttgtttctaaaaatatcctcc

SEQ ID NO: 2524 - DNA, 78 bp, synthetic construct; identical to SEQ ID NO: 2358
  misc_feature 1..78: note = Description of Artificial Sequence: Synthetic oligonucleotide
  source 1..78: mol_type = other DNA

SEQ ID NO: 2525 - DNA, 67 bp, synthetic construct; identical to SEQ ID NO: 2356
  misc_feature 1..67: note = Description of Artificial Sequence: Synthetic oligonucleotide
  source 1..67: mol_type = other DNA

SEQ ID NO: 2526 - DNA, 81 bp, synthetic construct; identical to SEQ ID NO: 2359
  misc_feature 1..81: note = Description of Artificial Sequence: Synthetic oligonucleotide
  source 1..81: mol_type = other DNA

SEQ ID NO: 2527 - DNA, 79 bp, synthetic construct; identical to SEQ ID NO: 2365
  misc_feature 1..79: note = Description of Artificial Sequence: Synthetic oligonucleotide
  source 1..79: mol_type = other DNA

SEQ ID NO: 2528 - DNA, 78 bp, synthetic construct; identical to SEQ ID NO: 2358
  misc_feature 1..78: note = Description of Artificial Sequence: Synthetic oligonucleotide
  source 1..78: mol_type = other DNA

SEQ ID NO: 2529 - DNA, 75 bp, synthetic construct; identical to SEQ ID NO: 2360
  misc_feature 1..75: note = Description of Artificial Sequence: Synthetic oligonucleotide
  source 1..75: mol_type = other DNA

SEQ ID NO: 2530 - DNA, 65 bp, synthetic construct
  misc_feature 1..65: note = Description of Artificial Sequence: Synthetic oligonucleotide
  source 1..65: mol_type = other DNA
tcttgactcagaaaccctgttctcctctacatatctttcagcagttgtttctaaaaatatcctcc

SEQ ID NO: 2531 - DNA, 67 bp, synthetic construct; identical to SEQ ID NO: 2356
  misc_feature 1..67: note = Description of Artificial Sequence: Synthetic oligonucleotide
  source 1..67: mol_type = other DNA

SEQ ID NO: 2532 - DNA, 81 bp, synthetic construct; identical to SEQ ID NO: 2359
  misc_feature 1..81: note = Description of Artificial Sequence: Synthetic oligonucleotide
  source 1..81: mol_type = other DNA

SEQ ID NO: 2533 - DNA, 79 bp, synthetic construct; identical to SEQ ID NO: 2357
  misc_feature 1..79: note = Description of Artificial Sequence: Synthetic oligonucleotide
  source 1..79: mol_type = other DNA

SEQ ID NO: 2534 - DNA, 78 bp, synthetic construct; identical to SEQ ID NO: 2358
  misc_feature 1..78: note = Description of Artificial Sequence: Synthetic oligonucleotide
  source 1..78: mol_type = other DNA

SEQ ID NO: 2535 - DNA, 80 bp, synthetic construct; identical to SEQ ID NO: 2520
  misc_feature 1..80: note = Description of Artificial Sequence: Synthetic oligonucleotide
  source 1..80: mol_type = other DNA

SEQ ID NO: 2536 - DNA, 75 bp, synthetic construct; identical to SEQ ID NO: 2360
  misc_feature 1..75: note = Description of Artificial Sequence: Synthetic oligonucleotide
  source 1..75: mol_type = other DNA

SEQ ID NO: 2537 - DNA, 67 bp, synthetic construct; identical to SEQ ID NO: 2356
  misc_feature 1..67: note = Description of Artificial Sequence: Synthetic oligonucleotide
  source 1..67: mol_type = other DNA

SEQ ID NO: 2538 - DNA, 79 bp, synthetic construct; identical to SEQ ID NO: 2357
  misc_feature 1..79: note = Description of Artificial Sequence: Synthetic oligonucleotide
  source 1..79: mol_type = other DNA

SEQ ID NO: 2539 - DNA, 81 bp, synthetic construct; identical to SEQ ID NO: 2359
  misc_feature 1..81: note = Description of Artificial Sequence: Synthetic oligonucleotide
  source 1..81: mol_type = other DNA

SEQ ID NO: 2540 - DNA, 76 bp, synthetic construct
  misc_feature 1..76: note = Description of Artificial Sequence: Synthetic oligonucleotide
  source 1..76: mol_type = other DNA
tcttgactcagaaaccctgttctcctctacatatctccccaccgtctttcagcagttgtttctaaaaatatcctcc

SEQ ID NO: 2541 - DNA, 74 bp, synthetic construct
  misc_feature 1..74: note = Description of Artificial Sequence: Synthetic oligonucleotide
  source 1..74: mol_type = other DNA
tcttgactcagaaaccctgttctcctctacatatctccccactctttcagcagttgtttctaaaaatatcctcc

SEQ ID NO: 2542 - DNA, 65 bp, synthetic construct
  misc_feature 1..65: note = Description of Artificial Sequence: Synthetic oligonucleotide
  source 1..65: mol_type = other DNA
tcttgactcagaaaccctgttctcctctgcatatctttcagcagttgtttctaaaaatatcctcc

SEQ ID NO: 2543 - DNA, 67 bp, synthetic construct; identical to SEQ ID NO: 2356
  misc_feature 1..67: note = Description of Artificial Sequence: Synthetic oligonucleotide
  source 1..67: mol_type = other DNA

SEQ ID NO: 2544 - DNA, 80 bp, synthetic construct; identical to SEQ ID NO: 2520
  misc_feature 1..80: note = Description of Artificial Sequence: Synthetic oligonucleotide
  source 1..80: mol_type = other DNA

SEQ ID NO: 2545 - DNA, 81 bp, synthetic construct; identical to SEQ ID NO: 2359
  misc_feature 1..81: note = Description of Artificial Sequence: Synthetic oligonucleotide
  source 1..81: mol_type = other DNA

SEQ ID NO: 2546 - DNA, 79 bp, synthetic construct; identical to SEQ ID NO: 2365
  misc_feature 1..79: note = Description of Artificial Sequence: Synthetic oligonucleotide
  source 1..79: mol_type = other DNA

SEQ ID NO: 2547 - DNA, 75 bp, synthetic construct; identical to SEQ ID NO: 2360
  misc_feature 1..75: note = Description of Artificial Sequence: Synthetic oligonucleotide
  source 1..75: mol_type = other DNA

SEQ ID NO: 2548 - DNA, 79 bp, synthetic construct; identical to SEQ ID NO: 2357
  misc_feature 1..79: note = Description of Artificial Sequence: Synthetic oligonucleotide
  source 1..79: mol_type = other DNA

SEQ ID NO: 2549 - DNA, 67 bp, synthetic construct; identical to SEQ ID NO: 2356
  misc_feature 1..67: note = Description of Artificial Sequence: Synthetic oligonucleotide
  source 1..67: mol_type = other DNA

SEQ ID NO: 2550 - DNA, 80 bp, synthetic construct; identical to SEQ ID NO: 2520
  misc_feature 1..80: note = Description of Artificial Sequence: Synthetic oligonucleotide
  source 1..80: mol_type = other DNA

SEQ ID NO: 2551 - DNA, 81 bp, synthetic construct; identical to SEQ ID NO: 2359
  misc_feature 1..81: note = Description of Artificial Sequence: Synthetic oligonucleotide
  source 1..81: mol_type = other DNA

SEQ ID NO: 2552 - DNA, 75 bp, synthetic construct; identical to SEQ ID NO: 2360
  misc_feature 1..75: note = Description of Artificial Sequence: Synthetic oligonucleotide
  source 1..75: mol_type = other DNA

SEQ ID NO: 2553 - DNA, 79 bp, synthetic construct; identical to SEQ ID NO: 2357
  misc_feature 1..79: note = Description of Artificial Sequence: Synthetic oligonucleotide
  source 1..79: mol_type = other DNA

SEQ ID NO: 2554 - DNA, 78 bp, synthetic construct; identical to SEQ ID NO: 2358
  misc_feature 1..78: note = Description of Artificial Sequence: Synthetic oligonucleotide
  source 1..78: mol_type = other DNA

SEQ ID NO: 2555 - DNA, 67 bp, synthetic construct; identical to SEQ ID NO: 2356
  misc_feature 1..67: note = Description of Artificial Sequence: Synthetic oligonucleotide
  source 1..67: mol_type = other DNA

SEQ ID NO: 2556 - DNA, 79 bp, synthetic construct; identical to SEQ ID NO: 2357
  misc_feature 1..79: note = Description of Artificial Sequence: Synthetic oligonucleotide
  source 1..79: mol_type = other DNA

SEQ ID NO: 2557 - DNA, 81 bp, synthetic construct; identical to SEQ ID NO: 2359
  misc_feature 1..81: note = Description of Artificial Sequence: Synthetic oligonucleotide
  source 1..81: mol_type = other DNA

SEQ ID NO: 2558 - DNA, 78 bp, synthetic construct; identical to SEQ ID NO: 2358
  misc_feature 1..78: note = Description of Artificial Sequence: Synthetic oligonucleotide
  source 1..78: mol_type = other DNA

SEQ ID NO: 2559 - DNA, 75 bp, synthetic construct; identical to SEQ ID NO: 2360
  misc_feature 1..75: note = Description of Artificial Sequence: Synthetic oligonucleotide
  source 1..75: mol_type = other DNA

SEQ ID NO: 2560 - DNA, 65 bp, synthetic construct
  misc_feature 1..65: note = Description of Artificial Sequence: Synthetic oligonucleotide
  source 1..65: mol_type = other DNA
tcttgactcagaaaccctgttctcctctacatctctttcagcagttgtttctaaaaatatcctcc

SEQ ID NO: 2561 - DNA, 54 bp, synthetic construct
  misc_feature 1..54: note = Description of Artificial Sequence: Synthetic oligonucleotide
  source 1..54: mol_type = other DNA
tcttgactcagaaaccctgttctctttcagcagttgtttctaaaaatatcctcc

SEQ ID NO: 2562 - DNA, 67 bp, synthetic construct; identical to SEQ ID NO: 2356
  misc_feature 1..67: note = Description of Artificial Sequence: Synthetic oligonucleotide
  source 1..67: mol_type = other DNA

SEQ ID NO: 2563 - DNA, 79 bp, synthetic construct; identical to SEQ ID NO: 2357
  misc_feature 1..79: note = Description of Artificial Sequence: Synthetic oligonucleotide
  source 1..79: mol_type = other DNA

SEQ ID NO: 2564 - DNA, 81 bp, synthetic construct; identical to SEQ ID NO: 2359
  misc_feature 1..81: note = Description of Artificial Sequence: Synthetic oligonucleotide
  source 1..81: mol_type = other DNA

SEQ ID NO: 2565 - DNA, 75 bp, synthetic construct; identical to SEQ ID NO: 2360
  misc_feature 1..75: note = Description of Artificial Sequence: Synthetic oligonucleotide
  source 1..75: mol_type = other DNA

SEQ ID NO: 2566 - DNA, 79 bp, synthetic construct; identical to SEQ ID NO: 2365
  misc_feature 1..79: note = Description of Artificial Sequence: Synthetic oligonucleotide
  source 1..79: mol_type = other DNA

SEQ ID NO: 2567 - DNA, 74 bp, synthetic construct; identical to SEQ ID NO: 2541
  misc_feature 1..74: note = Description of Artificial Sequence: Synthetic oligonucleotide
  source 1..74: mol_type = other DNA

SEQ ID NO: 2568 - DNA, 81 bp, synthetic construct; identical to SEQ ID NO: 2407
  misc_feature 1..81: note = Description of Artificial Sequence: Synthetic oligonucleotide
  source 1..81: mol_type = other DNA

SEQ ID NO: 2569 - DNA, 73 bp, synthetic construct; identical to SEQ ID NO: 2406
  misc_feature 1..73: note = Description of Artificial Sequence: Synthetic oligonucleotide
  source 1..73: mol_type = other DNA

SEQ ID NO: 2570 - DNA, 81 bp, synthetic construct; identical to SEQ ID NO: 2408
  misc_feature 1..81: note = Description of Artificial Sequence: Synthetic oligonucleotide
  source 1..81: mol_type = other DNA

SEQ ID NO: 2571 - DNA, 72 bp, synthetic construct; identical to SEQ ID NO: 2414
  misc_feature 1..72: note = Description of Artificial Sequence: Synthetic oligonucleotide
  source 1..72: mol_type = other DNA

SEQ ID NO: 2572 - DNA, 73 bp, synthetic construct; identical to SEQ ID NO: 2415
  misc_feature 1..73: note = Description of Artificial Sequence: Synthetic oligonucleotide
  source 1..73: mol_type = other DNA

SEQ ID NO: 2573 - DNA, 74 bp, synthetic construct
  misc_feature 1..74: note = Description of Artificial Sequence: Synthetic oligonucleotide
  source 1..74: mol_type = other DNA
aaatgcttatgacagcaataatcataaaaacctcaaagccacttaaatgcttaccaacagtagaattgataaat

SEQ ID NO: 2574 - DNA, 79 bp, synthetic construct
  misc_feature 1..79: note = Description of Artificial Sequence: Synthetic oligonucleotide
  source 1..79: mol_type = other DNA
aaatgcttatgacagcaataatcataaaaacctcaaaccggtgccacttaaatgcttaccaacagtagaattgataaat

SEQ ID NO: 2575 - DNA, 81 bp, synthetic construct; identical to SEQ ID NO: 2407
  misc_feature 1..81: note = Description of Artificial Sequence: Synthetic oligonucleotide
  source 1..81: mol_type = other DNA

SEQ ID NO: 2576 - DNA, 73 bp, synthetic construct; identical to SEQ ID NO: 2406
  misc_feature 1..73: note = Description of Artificial Sequence: Synthetic oligonucleotide
  source 1..73: mol_type = other DNA

SEQ ID NO: 2577 - DNA, 73 bp, synthetic construct
  misc_feature 1..73: note = Description of Artificial Sequence: Synthetic oligonucleotide
  source 1..73: mol_type = other DNA
aaatgcttatgacagcaataatcataaaaacctcaagccacttaaatgcttaccaacagtagaattgataaat

SEQ ID NO: 2578 - DNA, 72 bp, synthetic construct; identical to SEQ ID NO: 2414
  misc_feature 1..72: note = Description of Artificial Sequence: Synthetic oligonucleotide
  source 1..72: mol_type = other DNA

SEQ ID NO: 2579 - DNA, 81 bp, synthetic construct; identical to SEQ ID NO: 2408
  misc_feature 1..81: note = Description of Artificial Sequence: Synthetic oligonucleotide
  source 1..81: mol_type = other DNA

SEQ ID NO: 2580 - DNA, 45 bp, synthetic construct
  misc_feature 1..45: note = Description of Artificial Sequence: Synthetic oligonucleotide
  source 1..45: mol_type = other DNA
aaatgcttatgacagcaataattaccaacagtagaattgataaat

SEQ ID NO: 2581 - DNA, 64 bp, synthetic construct
  misc_feature 1..64: note = Description of Artificial Sequence: Synthetic oligonucleotide
  source 1..64: mol_type = other DNA
aaatgcttatgacagcaataatcataaaaacctcaaatgcttaccaacagtagaattgataaat

SEQ ID NO: 2582 - DNA, 81 bp, synthetic construct; identical to SEQ ID NO: 2407
  misc_feature 1..81: note = Description of Artificial Sequence: Synthetic oligonucleotide
  source 1..81: mol_type = other DNA

SEQ ID NO: 2583 - DNA, 73 bp, synthetic construct; identical to SEQ ID NO: 2406
  misc_feature 1..73: note = Description of Artificial Sequence: Synthetic oligonucleotide
  source 1..73: mol_type = other DNA

SEQ ID NO: 2584 - DNA, 72 bp, synthetic construct; identical to SEQ ID NO: 2414
  misc_feature 1..72: note = Description of Artificial Sequence: Synthetic oligonucleotide
  source 1..72: mol_type = other DNA

SEQ ID NO: 2585 - DNA, 73 bp, synthetic construct; identical to SEQ ID NO: 2415
  misc_feature 1..73: note = Description of Artificial Sequence: Synthetic oligonucleotide
  source 1..73: mol_type = other DNA

SEQ ID NO: 2586 - DNA, 81 bp, synthetic construct; identical to SEQ ID NO: 2408
  misc_feature 1..81: note = Description of Artificial Sequence: Synthetic oligonucleotide
  source 1..81: mol_type = other DNA

SEQ ID NO: 2587 - DNA, 73 bp, synthetic construct; identical to SEQ ID NO: 2577
  misc_feature 1..73: note = Description of Artificial Sequence: Synthetic oligonucleotide
  source 1..73: mol_type = other DNA

SEQ ID NO: 2588 - DNA, 72 bp, synthetic construct; identical to SEQ ID NO: 2409
  misc_feature 1..72: note = Description of Artificial Sequence: Synthetic oligonucleotide
  source 1..72: mol_type = other DNA

SEQ ID NO: 2589 - DNA, 73 bp, synthetic construct; identical to SEQ ID NO: 2406
  misc_feature 1..73: note = Description of Artificial Sequence: Synthetic oligonucleotide
  source 1..73: mol_type = other DNA

SEQ ID NO: 2590 - DNA, 81 bp, synthetic construct; identical to SEQ ID NO: 2407
  misc_feature 1..81: note = Description of Artificial Sequence: Synthetic oligonucleotide
  source 1..81: mol_type = other DNA

SEQ ID NO: 2591 - DNA, 72 bp, synthetic construct; identical to SEQ ID NO: 2414
  misc_feature 1..72: note = Description of Artificial Sequence: Synthetic oligonucleotide
  source 1..72: mol_type = other DNA

SEQ ID NO: 2592 - DNA, 81 bp, synthetic construct; identical to SEQ ID NO: 2408
  misc_feature 1..81: note = Description of Artificial Sequence: Synthetic oligonucleotide
  source 1..81: mol_type = other DNA

SEQ ID NO: 2593 - DNA, 77 bp, synthetic construct
  misc_feature 1..77: note = Description of Artificial Sequence: Synthetic oligonucleotide
  source 1..77: mol_type = other DNA
aaatgcttatgacagcaataatcataaaaacctcaaaccggccacttaaatgcttaccaacagtagaattgataaat

SEQ ID NO: 2594 - DNA, 70 bp, synthetic construct
  misc_feature 1..70: note = Description of Artificial Sequence: Synthetic oligonucleotide
  source 1..70: mol_type = other DNA
aaatgcttatgacagcaataatcataaaaacctcaaacttaaatgcttaccaacagtagaattgataaat

SEQ ID NO: 2595 - DNA, 73 bp, synthetic construct; identical to SEQ ID NO: 2415
  misc_feature 1..73: note = Description of Artificial Sequence: Synthetic oligonucleotide
  source 1..73: mol_type = other DNA

SEQ ID NO: 2596 - DNA, 81 bp, synthetic construct; identical to SEQ ID NO: 2407
  misc_feature 1..81: note = Description of Artificial Sequence: Synthetic oligonucleotide
  source 1..81: mol_type = other DNA

SEQ ID NO: 2597 - DNA, 73 bp, synthetic construct; identical to SEQ ID NO: 2406
  misc_feature 1..73: note = Description of Artificial Sequence: Synthetic oligonucleotide
  source 1..73: mol_type = other DNA

SEQ ID NO: 2598 - DNA, 55 bp, synthetic construct
  misc_feature 1..55: note = Description of Artificial Sequence: Synthetic oligonucleotide
  source 1..55: mol_type = other DNA
aaatgcttatgacagcaataatcataaaaacctcaaaccggtagaattgataaat

SEQ ID NO: 2599 - DNA, 79 bp, synthetic construct; identical to SEQ ID NO: 2574
  misc_feature 1..79: note = Description of Artificial Sequence: Synthetic oligonucleotide
  source 1..79: mol_type = other DNA

SEQ ID NO: 2600 - DNA, 81 bp, synthetic construct; identical to SEQ ID NO: 2408
  misc_feature 1..81: note = Description of Artificial Sequence: Synthetic oligonucleotide
  source 1..81: mol_type = other DNA

SEQ ID NO: 2601 - DNA, 79 bp, synthetic construct
  misc_feature 1..79: note = Description of Artificial Sequence: Synthetic oligonucleotide
  source 1..79: mol_type = other DNA
aaatgcttatgacagcaataatcataaaaacctcaaaccggtaccacttaaatgcttaccaacagtagaattgataaat

SEQ ID NO: 2602 - DNA, 77 bp, synthetic construct
  misc_feature 1..77: note = Description of Artificial Sequence: Synthetic oligonucleotide
  source 1..77: mol_type = other DNA
aaatgcttatgacagcaataatcataaaaacctcaaaccggtaacttaaatgcttaccaacagtagaattgataaat

SEQ ID NO: 2603 - DNA, 73 bp, synthetic construct; identical to SEQ ID NO: 2406
  misc_feature 1..73: note = Description of Artificial Sequence: Synthetic oligonucleotide
  source 1..73: mol_type = other DNA

SEQ ID NO: 2604 - DNA, 81 bp, synthetic construct; identical to SEQ ID NO: 2407
  misc_feature 1..81: note = Description of Artificial Sequence: Synthetic oligonucleotide
  source 1..81: mol_type = other DNA

SEQ ID NO: 2605 - DNA, 81 bp, synthetic construct; identical to SEQ ID NO: 2408
  misc_feature 1..81: note = Description of Artificial Sequence: Synthetic oligonucleotide
  source 1..81: mol_type = other DNA

SEQ ID NO: 2606 - DNA, 73 bp, synthetic construct; identical to SEQ ID NO: 2415
  misc_feature 1..73: note = Description of Artificial Sequence: Synthetic oligonucleotide
  source 1..73: mol_type = other DNA

SEQ ID NO: 2607 - DNA, 72 bp, synthetic construct; identical to SEQ ID NO: 2414
  misc_feature 1..72: note = Description of Artificial Sequence: Synthetic oligonucleotide
  source 1..72: mol_type = other DNA

SEQ ID NO: 2608 - DNA, 76 bp, synthetic construct
  misc_feature 1..76: note = Description of Artificial Sequence: Synthetic oligonucleotide
  source 1..76: mol_type = other DNA
aaatgcttatgacagcaataatcataaaaacctcaaaccggtacttaaatgcttaccaacagtagaattgataaat

SEQ ID NO: 2609 - DNA, 81 bp, synthetic construct
  misc_feature 1..81: note = Description of Artificial Sequence: Synthetic oligonucleotide
  source 1..81: mol_type = other DNA
aaatgcttatgacagcaataatcataaaaacctcaaaccggtatgccacttaaatgcttaccaacagtagaattgataaat

SEQ ID NO: 2610 - DNA, 76 bp, synthetic construct; identical to SEQ ID NO: 2456
  misc_feature 1..76: note = Description of Artificial Sequence: Synthetic oligonucleotide
  source 1..76: mol_type = other DNA

SEQ ID NO: 2611 - DNA, 79 bp, synthetic construct; identical to SEQ ID NO: 2457
  misc_feature 1..79: note = Description of Artificial Sequence: Synthetic oligonucleotide
  source 1..79: mol_type = other DNA

SEQ ID NO: 2612 - DNA, 75 bp, synthetic construct; identical to SEQ ID NO: 2458
  misc_feature 1..75: note = Description of Artificial Sequence: Synthetic oligonucleotide
  source 1..75: mol_type = other DNA

SEQ ID NO: 2613 - DNA, 70 bp, synthetic construct
  misc_feature 1..70: note = Description of Artificial Sequence: Synthetic oligonucleotide
  source 1..70: mol_type = other DNA
tagcatctactcttgttcaggaaacaatgagggcagtaagagtggtgattaatagatagggacaaattga

SEQ ID NO: 2614 - DNA, 70 bp, synthetic construct; identical to SEQ ID NO: 2464
  misc_feature 1..70: note = Description of Artificial Sequence: Synthetic oligonucleotide
  source 1..70: mol_type = other DNA

SEQ ID NO: 2615 - DNA, 55 bp, synthetic construct
  misc_feature 1..55: note = Description of Artificial Sequence: Synthetic oligonucleotide
  source 1..55: mol_type = other DNA
tagcatctactcttgttcaggtaagagtggtgattaatagatagggacaaattga

SEQ ID NO: 2616 - DNA, 80 bp, synthetic construct
  misc_feature 1..80: note = Description of Artificial Sequence: Synthetic oligonucleotide
  source 1..80: mol_type = other DNA
tagcatctactcttgttcaggaaacaatgaggaccttactgggcagtaagagtggtgattaatagatagggacaaattga

SEQ ID NO: 2617 - DNA, 76 bp, synthetic construct; identical to SEQ ID NO: 2456
  misc_feature 1..76: note = Description of Artificial Sequence: Synthetic oligonucleotide
  source 1..76: mol_type = other DNA

SEQ ID NO: 2618 - DNA, 79 bp, synthetic construct; identical to SEQ ID NO: 2457
  misc_feature 1..79: note = Description of Artificial Sequence: Synthetic oligonucleotide
  source 1..79: mol_type = other DNA

SEQ ID NO: 2619 - DNA, 75 bp, synthetic construct; identical to SEQ ID NO: 2458
  misc_feature 1..75: note = Description of Artificial Sequence: Synthetic oligonucleotide
  source 1..75: mol_type = other DNA

SEQ ID NO: 2620 - DNA, 78 bp, synthetic construct
  misc_feature 1..78: note = Description of Artificial Sequence: Synthetic oligonucleotide
  source 1..78: mol_type = other DNA
tagcatctactcttgttcaggaaacaatgaggacctgtgggcagtaagagtggtgattaatagatagggacaaattga

SEQ ID NO: 2621 - DNA, 81 bp, synthetic construct
  misc_feature 1..81: note = Description of Artificial Sequence: Synthetic oligonucleotide
  source 1..81: mol_type = other DNA
tagcatctactcttgttcaggaaacaatgaggacctgtactgggcagtaagagtggtgattaatagatagggacaaattga

SEQ ID NO: 2622 - DNA, 70 bp, synthetic construct; identical to SEQ ID NO: 2464
  misc_feature 1..70: note = Description of Artificial Sequence: Synthetic oligonucleotide
  source 1..70: mol_type = other DNA

SEQ ID NO: 2623 - DNA, 81 bp, synthetic construct
  misc_feature 1..81: note = Description of Artificial Sequence: Synthetic oligonucleotide
  source 1..81: mol_type = other DNA
tagcatctactcttgttcaggaaacaatgaggacctgaactgggcagtaagagtggtgattaatagatagggacaaattga

SEQ ID NO: 2624 - DNA, 76 bp, synthetic construct; identical to SEQ ID NO: 2456
  misc_feature 1..76: note = Description of Artificial Sequence: Synthetic oligonucleotide
  source 1..76: mol_type = other DNA

SEQ ID NO: 2625 - DNA, 79 bp, synthetic construct; identical to SEQ ID NO: 2457
  misc_feature 1..79: note = Description of Artificial Sequence: Synthetic oligonucleotide
  source 1..79: mol_type = other DNA

SEQ ID NO: 2626 - DNA, 75 bp, synthetic construct; identical to SEQ ID NO: 2458
  misc_feature 1..75: note = Description of Artificial Sequence: Synthetic oligonucleotide
  source 1..75: mol_type = other DNA

SEQ ID NO: 2627 - DNA, 69 bp, synthetic construct; identical to SEQ ID NO: 2459
  misc_feature 1..69: note = Description of Artificial Sequence: Synthetic oligonucleotide
  source 1..69: mol_type = other DNA

SEQ ID NO: 2628 - DNA, 70 bp, synthetic construct; identical to SEQ ID NO: 2613
  misc_feature 1..70: note = Description of Artificial Sequence: Synthetic oligonucleotide
  source 1..70: mol_type = other DNA

SEQ ID NO: 2629 - DNA, 81 bp, synthetic construct; identical to SEQ ID NO: 2621
  misc_feature 1..81: note = Description of Artificial Sequence: Synthetic oligonucleotide
  source 1..81: mol_type = other DNA

SEQ ID NO: 2630 - DNA, 68 bp, synthetic construct; identical to SEQ ID NO: 2460
  misc_feature 1..68: note = Description of Artificial Sequence: Synthetic oligonucleotide
  source 1..68: mol_type = other DNA

SEQ ID NO: 2631 - DNA, 76 bp, synthetic construct; identical to SEQ ID NO: 2456
  misc_feature 1..76: note = Description of Artificial Sequence: Synthetic oligonucleotide
  source 1..76: mol_type = other DNA

SEQ ID NO: 2632 - DNA, 79 bp, synthetic construct; identical to SEQ ID NO: 2457
  misc_feature 1..79: note = Description of Artificial Sequence: Synthetic oligonucleotide
  source 1..79: mol_type = other DNA

SEQ ID NO: 2633 - DNA, 75 bp, synthetic construct; identical to SEQ ID NO: 2458
  misc_feature 1..75: note = Description of Artificial Sequence: Synthetic oligonucleotide
  source 1..75: mol_type = other DNA

SEQ ID NO: 2634 - DNA, 70 bp, synthetic construct; identical to SEQ ID NO: 2464
  misc_feature 1..70: note = Description of Artificial Sequence: Synthetic oligonucleotide
  source 1..70: mol_type = other DNA

SEQ ID NO: 2635 - DNA, 81 bp, synthetic construct; identical to SEQ ID NO: 2621
  misc_feature 1..81: note = Description of Artificial Sequence: Synthetic oligonucleotide
  source 1..81: mol_type = other DNA

SEQ ID NO: 2636 - DNA, 68 bp, synthetic construct; identical to SEQ ID NO: 2460
  misc_feature 1..68: note = Description of Artificial Sequence: Synthetic oligonucleotide
  source 1..68: mol_type = other DNA

SEQ ID NO: 2637 - DNA, 69 bp, synthetic construct; identical to SEQ ID NO: 2459
  misc_feature 1..69: note = Description of Artificial Sequence: Synthetic oligonucleotide
  source 1..69: mol_type = other DNA

SEQ ID NO: 2638 - DNA, 76 bp, synthetic construct; identical to SEQ ID NO: 2456
  misc_feature 1..76: note = Description of Artificial Sequence: Synthetic oligonucleotide
  source 1..76: mol_type = other DNA

SEQ ID NO: 2639 - DNA, 79 bp, synthetic construct; identical to SEQ ID NO: 2457
  misc_feature 1..79: note = Description of Artificial Sequence: Synthetic oligonucleotide
  source 1..79: mol_type = other DNA

SEQ ID NO: 2640 - DNA, 75 bp, synthetic construct; identical to SEQ ID NO: 2458
  misc_feature 1..75: note = Description of Artificial Sequence: Synthetic oligonucleotide
  source 1..75: mol_type = other DNA

SEQ ID NO: 2641 - DNA, 81 bp, synthetic construct; identical to SEQ ID NO: 2621
  misc_feature 1..81: note = Description of Artificial Sequence: Synthetic oligonucleotide
  source 1..81: mol_type = other DNA

SEQ ID NO: 2642 - DNA, 78 bp, synthetic construct
  misc_feature 1..78: note = Description of Artificial Sequence: Synthetic oligonucleotide
  source 1..78: mol_type = other DNA
tagcatctactcttgttcaggaaacaatgaggaccactgggcagtaagagtggtgattaatagatagggacaaattga

SEQ ID NO: 2643 - DNA, 70 bp, synthetic construct; identical to SEQ ID NO: 2464
  misc_feature 1..70: note = Description of Artificial Sequence: Synthetic oligonucleotide
  source 1..70: mol_type = other DNA

SEQ ID NO: 2644 - DNA, 72 bp, synthetic construct
  misc_feature 1..72: note = Description of Artificial Sequence: Synthetic oligonucleotide
  source 1..72: mol_type = other DNA
tagcatctactcttgttcaggaaacaatgaggacctggtaagagtggtgattaatagatagggacaaattga

SEQ ID NO: 2645 - DNA, 76 bp, synthetic construct; identical to SEQ ID NO: 2456
  misc_feature 1..76: note = Description of Artificial Sequence: Synthetic oligonucleotide
  source 1..76: mol_type = other DNA

SEQ ID NO: 2646 - DNA, 79 bp, synthetic construct; identical to SEQ ID NO: 2457
  misc_feature 1..79: note = Description of Artificial Sequence: Synthetic oligonucleotide
  source 1..79: mol_type = other DNA

SEQ ID NO: 2647 - DNA, 75 bp, synthetic construct; identical to SEQ ID NO: 2458
  misc_feature 1..75: note = Description of Artificial Sequence: Synthetic oligonucleotide
  source 1..75: mol_type = other DNA

SEQ ID NO: 2648 - DNA, 70 bp, synthetic construct; identical to SEQ ID NO: 2464
  misc_feature 1..70: note = Description of Artificial Sequence: Synthetic oligonucleotide
  source 1..70: mol_type = other DNA

SEQ ID NO: 2649 - DNA, 69 bp, synthetic construct; identical to SEQ ID NO: 2459
  misc_feature 1..69: note = Description of Artificial Sequence: Synthetic oligonucleotide
  source 1..69: mol_type = other DNA

SEQ ID NO: 2650 - DNA, 71 bp, synthetic construct
  misc_feature 1..71: note = Description of Artificial Sequence: Synthetic oligonucleotide
  source 1..71: mol_type = other DNA
tagcatctactcttgttcaggaaacaatgaggacctgtaagagtggtgattaatagatagggacaaattga

SEQ ID NO: 2651 - DNA, 68 bp, synthetic construct; identical to SEQ ID NO: 2460
  misc_feature 1..68: note = Description of Artificial Sequence: Synthetic oligonucleotide
  source 1..68: mol_type = other DNA

SEQ ID NO: 2652 - DNA, 77 bp, synthetic construct
  misc_feature 1..77: note = Description of Artificial Sequence: Synthetic oligonucleotide
  source 1..77: mol_type = other DNA
ctggaagagaaacagttttagtataacaagtgaaatacccatgagtctgaggtgcctataggacatctatataaata

SEQ ID NO: 2653 - DNA, 80 bp, synthetic construct
  misc_feature 1..80: note = Description of Artificial Sequence: Synthetic oligonucleotide
  source 1..80: mol_type = other DNA
ctggaagagaaatagttttagtataacaagtgaaatacccatgctgagtctgaggtgcctataggacatctatataaata

SEQ ID NO: 2654 - DNA, 77 bp, synthetic construct
  misc_feature 1..77: note = Description of Artificial Sequence: Synthetic oligonucleotide
  source 1..77: mol_type = other DNA
ctggaagagaaatagttttagtataacaagtgaaatacccatgagtctgaggtgcctataggacatctatataaata

SEQ ID NO: 2655 - DNA, 79 bp, synthetic construct
  misc_feature 1..79: note = Description of Artificial Sequence: Synthetic oligonucleotide
  source 1..79: mol_type = other DNA
ctggaagagaaacagttttagtataacaagtgaaatacccatctgagtctgaggtgcctataggacatctatataaata

SEQ ID NO: 2656 - DNA, 66 bp, synthetic construct
  misc_feature 1..66: note = Description of Artificial Sequence: Synthetic oligonucleotide
  source 1..66: mol_type = other DNA
ctggaagagaaacagttttagtataacaagtgagtctgaggtgcctataggacatctatataaata

SEQ ID NO: 2657 - DNA, 78 bp, synthetic construct
  misc_feature 1..78: note = Description of Artificial Sequence: Synthetic oligonucleotide
  source 1..78: mol_type = other DNA
ctggaagagaaacagttttagtataacaagtgaaatacccatggagtctgaggtgcctataggacatctatataaata

SEQ ID NO: 2658 - DNA, 74 bp, synthetic construct
  misc_feature 1..74: note = Description of Artificial Sequence: Synthetic oligonucleotide
  source 1..74: mol_type = other DNA
ctggaagagaaacagttttagtataacaagtgaaatactgagtctgaggtgcctataggacatctatataaata

SEQ ID NO: 2659 - DNA, 77 bp, synthetic construct; identical to SEQ ID NO: 2652
  misc_feature 1..77: note = Description of Artificial Sequence: Synthetic oligonucleotide
  source 1..77: mol_type = other DNA

SEQ ID NO: 2660 - DNA, 78 bp, synthetic construct
  misc_feature 1..78: note = Description of Artificial Sequence: Synthetic oligonucleotide
  source 1..78: mol_type = other DNA
ctggaagagaaacagttttagtataacaagtgaaatacccactgagtctgaggtgcctataggacatctatataaata

SEQ ID NO: 2661 - DNA, 79 bp, synthetic construct; identical to SEQ ID NO: 2655
  misc_feature 1..79: note = Description of Artificial Sequence: Synthetic oligonucleotide
  source 1..79: mol_type = other DNA

SEQ ID NO: 2662 - DNA, 78 bp, synthetic construct; identical to SEQ ID NO: 2657
  misc_feature 1..78: note = Description of Artificial Sequence: Synthetic oligonucleotide
  source 1..78: mol_type = other DNA

SEQ ID NO: 2663 - DNA, 66 bp, synthetic construct; identical to SEQ ID NO: 2656
  misc_feature 1..66: note = Description of Artificial Sequence: Synthetic oligonucleotide
  source 1..66: mol_type = other DNA

SEQ ID NO: 2664 - DNA, 77 bp, synthetic construct; identical to SEQ ID NO: 2654
  misc_feature 1..77: note = Description of Artificial Sequence: Synthetic oligonucleotide
  source 1..77: mol_type = other DNA

SEQ ID NO: 2665 - DNA, 79 bp, synthetic construct
  misc_feature 1..79: note = Description of Artificial Sequence: Synthetic oligonucleotide
  source 1..79: mol_type = other DNA
ctggaagagaaacagttttagtataacaagtgaaatacccatgtgagtctgaggtgcctataggacatctatataaata

SEQ ID NO: 2666 - DNA, 77 bp, synthetic construct; identical to SEQ ID NO: 2652
  misc_feature 1..77: note = Description of Artificial Sequence: Synthetic oligonucleotide
  source 1..77: mol_type = other DNA

SEQ ID NO: 2667 - DNA, 80 bp, synthetic construct; identical to SEQ ID NO: 2653
  misc_feature 1..80: note = Description of Artificial Sequence: Synthetic oligonucleotide
  source 1..80: mol_type = other DNA

SEQ ID NO: 2668 - DNA, 77 bp, synthetic construct; identical to SEQ ID NO: 2654
  misc_feature 1..77: note = Description of Artificial Sequence: Synthetic oligonucleotide
  source 1..77: mol_type = other DNA

SEQ ID NO: 2669 - DNA, 79 bp, synthetic construct; identical to SEQ ID NO: 2655
  misc_feature 1..79: note = Description of Artificial Sequence: Synthetic oligonucleotide
  source 1..79: mol_type = other DNA

SEQ ID NO: 2670 - DNA, 78 bp, synthetic construct; identical to SEQ ID NO: 2660
  misc_feature 1..78: note = Description of Artificial Sequence: Synthetic oligonucleotide
  source 1..78: mol_type = other DNA

SEQ ID NO: 2671 - DNA, 66 bp, synthetic construct; identical to SEQ ID NO: 2656
  misc_feature 1..66: note = Description of Artificial Sequence: Synthetic oligonucleotide
  source 1..66: mol_type = other DNA

SEQ ID NO: 2672 - DNA, 75 bp, synthetic construct
  misc_feature 1..75: note = Description of Artificial Sequence: Synthetic oligonucleotide
  source 1..75: mol_type = other DNA
ctggaagagaaacagttttagtataacaagtgaaatacctgagtctgaggtgcctataggacatctatataaata

SEQ ID NO: 2673 - DNA, 77 bp, synthetic construct; identical to SEQ ID NO: 2652
  misc_feature 1..77: note = Description of Artificial Sequence: Synthetic oligonucleotide
  source 1..77: mol_type = other DNA

SEQ ID NO: 2674 - DNA, 77 bp, synthetic construct; identical to SEQ ID NO: 2654
  misc_feature 1..77: note = Description of Artificial Sequence: Synthetic oligonucleotide
  source 1..77: mol_type = other DNA

SEQ ID NO: 2675 - DNA, 80 bp, synthetic construct; identical to SEQ ID NO: 2653
  misc_feature 1..80: note = Description of Artificial Sequence: Synthetic oligonucleotide
  source 1..80: mol_type = other DNA

SEQ ID NO: 2676 - DNA, 79 bp, synthetic construct; identical to SEQ ID NO: 2655
  misc_feature 1..79: note = Description of Artificial Sequence: Synthetic oligonucleotide
  source 1..79: mol_type = other DNA

SEQ ID NO: 2677 - DNA, 78 bp, synthetic construct; identical to SEQ ID NO: 2657
  misc_feature 1..78: note = Description of Artificial Sequence: Synthetic oligonucleotide
  source 1..78: mol_type = other DNA

SEQ ID NO: 2678 - DNA, 78 bp, synthetic construct; identical to SEQ ID NO: 2660
  misc_feature 1..78: note = Description of Artificial Sequence: Synthetic oligonucleotide
  source 1..78: mol_type = other DNA

SEQ ID NO: 2679 - DNA, 79 bp, synthetic construct
  misc_feature 1..79: note = Description of Artificial Sequence: Synthetic oligonucleotide
  source 1..79: mol_type = other DNA
ctggaagagaaatagttttagtataacaagtgaaatacccatctgagtctgaggtgcctataggacatctatataaata

SEQ ID NO: 2680 - DNA, 79 bp, synthetic construct; identical to SEQ ID NO: 2655
  misc_feature 1..79: note = Description of Artificial Sequence: Synthetic oligonucleotide
  source 1..79: mol_type = other DNA

SEQ ID NO: 2681 - DNA, 77 bp, synthetic construct; identical to SEQ ID NO: 2652
  misc_feature 1..77: note = Description of Artificial Sequence: Synthetic oligonucleotide
  source 1..77: mol_type = other DNA

SEQ ID NO: 2682 - DNA, 78 bp, synthetic construct; identical to SEQ ID NO: 2657
  misc_feature 1..78: note = Description of Artificial Sequence: Synthetic oligonucleotide
  source 1..78: mol_type = other DNA

SEQ ID NO: 2683 - DNA, 78 bp, synthetic construct; identical to SEQ ID NO: 2660
  misc_feature 1..78: note = Description of Artificial Sequence: Synthetic oligonucleotide
  source 1..78: mol_type = other DNA

SEQ ID NO: 2684 - DNA, 79 bp, synthetic construct; identical to SEQ ID NO: 2679
  misc_feature 1..79: note = Description of Artificial Sequence: Synthetic oligonucleotide
  source 1..79: mol_type = other DNA

SEQ ID NO: 2685 - DNA, 76 bp, synthetic construct
  misc_feature 1..76: note = Description of Artificial Sequence: Synthetic oligonucleotide
  source 1..76: mol_type = other DNA
ctggaagagaaacagttttagtataacaagtgaaataccctgagtctgaggtgcctataggacatctatataaata

SEQ ID NO: 2686 - DNA, 75 bp, synthetic construct; identical to SEQ ID NO: 2672
  misc_feature 1..75: note = Description of Artificial Sequence: Synthetic oligonucleotide
  source 1..75: mol_type = other DNA

SEQ ID NO: 2687 - DNA, 77 bp, synthetic construct; identical to SEQ ID NO: 2652
  misc_feature 1..77: note = Description of Artificial Sequence: Synthetic oligonucleotide
  source 1..77: mol_type = other DNA

SEQ ID NO: 2688 - DNA, 77 bp, synthetic construct; identical to SEQ ID NO: 2654
  misc_feature 1..77: note = Description of Artificial Sequence: Synthetic oligonucleotide
  source 1..77: mol_type = other DNA

SEQ ID NO: 2689 - DNA, 79 bp, synthetic construct; identical to SEQ ID NO: 2655
  misc_feature 1..79: note = Description of Artificial Sequence: Synthetic oligonucleotide
  source 1..79: mol_type = other DNA

SEQ ID NO: 2690 - DNA, 80 bp, synthetic construct; identical to SEQ ID NO: 2653
  misc_feature 1..80: note = Description of Artificial Sequence: Synthetic oligonucleotide
  source 1..80: mol_type = other DNA

SEQ ID NO: 2691 - DNA, 78 bp, synthetic construct; identical to SEQ ID NO: 2660
  misc_feature 1..78: note = Description of Artificial Sequence: Synthetic oligonucleotide
  source 1..78: mol_type = other DNA

SEQ ID NO: 2692 - DNA, 78 bp, synthetic construct; identical to SEQ ID NO: 2657
  misc_feature 1..78: note = Description of Artificial Sequence: Synthetic oligonucleotide
  source 1..78: mol_type = other DNA

SEQ ID NO: 2693 - DNA, 76 bp, synthetic construct; identical to SEQ ID NO: 2685
  misc_feature 1..76: note = Description of Artificial Sequence: Synthetic oligonucleotide
  source 1..76: mol_type = other DNA

SEQ ID NO: 2694 - DNA, 79 bp, synthetic construct
  misc_feature 1..79: note = Description of Artificial Sequence: Synthetic oligonucleotide
  source 1..79: mol_type = other DNA
gtctagtgcaagctaacagttgcttttatcacaggctccaggagggtttggcctctgattagggtgggggcgtgggtgg

SEQ ID NO: 2695 - DNA, 76 bp, synthetic construct
  misc_feature 1..76: note = Description of Artificial Sequence: Synthetic oligonucleotide
  source 1..76: mol_type = other DNA
gtctagtgcaagctaacagttgcttttatcacaggctccagggtttggcctctgattagggtgggggcgtgggtgg

SEQ ID NO: 2696 - DNA, 81 bp, synthetic construct
  misc_feature 1..81: note = Description of Artificial Sequence: Synthetic oligonucleotide
  source 1..81: mol_type = other DNA
gtctagtgcaagctaacagttgcttttatcacaggctccaggaaagggtttggcctctgattagggtgggggcgtgggtgg

SEQ ID NO: 2697 - DNA, 75 bp, synthetic construct
  misc_feature 1..75: note = Description of Artificial Sequence: Synthetic oligonucleotide
  source 1..75: mol_type = other DNA
gtctagtgcaagctaacagttgcttttatcacaggctccaggtttggcctctgattagggtgggggcgtgggtgg

SEQ ID NO: 2698 - DNA, 44 bp, synthetic construct
  misc_feature 1..44: note = Description of Artificial Sequence: Synthetic oligonucleotide
  source 1..44: mol_type = other DNA
gtctagtgcaagctaacagttgcttttatcacaggcgtgggtgg

SEQ ID NO: 2699 - DNA, 52 bp, synthetic construct
  misc_feature 1..52: note = Description of Artificial Sequence: Synthetic oligonucleotide
  source 1..52: mol_type = other DNA
gtctagtgcaagctaacaacatcacaggctccaggatagggggcgtgggtgg

SEQ ID NO: 2700 - DNA, 78 bp, synthetic construct
  misc_feature 1..78: note = Description of Artificial Sequence: Synthetic oligonucleotide
  source 1..78: mol_type = other DNA
gtctagtgcaagctaacagttgcttttatcacaggctccaggaggtttggcctctgattagggtgggggcgtgggtgg

SEQ ID NO: 2701 - DNA, 57 bp, synthetic construct
  misc_feature 1..57: note = Description of Artificial Sequence: Synthetic oligonucleotide
  source 1..57: mol_type = other DNA
gtctagtgcaagctaacagttgcttttatcacaggctccaggtgggggcgtgggtgg

SEQ ID NO: 2702 - DNA, 76 bp, synthetic construct; identical to SEQ ID NO: 2695
  misc_feature 1..76: note = Description of Artificial Sequence: Synthetic oligonucleotide
  source 1..76: mol_type = other DNA

SEQ ID NO: 2703 - DNA, 75 bp, synthetic construct; identical to SEQ ID NO: 2697
  misc_feature 1..75: note = Description of Artificial Sequence: Synthetic oligonucleotide
  source 1..75: mol_type = other DNA

SEQ ID NO: 2704 - DNA, 79 bp, synthetic construct; identical to SEQ ID NO: 2694
  misc_feature 1..79: note = Description of Artificial Sequence: Synthetic oligonucleotide
  source 1..79: mol_type = other DNA

SEQ ID NO: 2705 - DNA, 81 bp, synthetic construct; identical to SEQ ID NO: 2696
  misc_feature 1..81: note = Description of Artificial Sequence: Synthetic oligonucleotide
  source 1..81: mol_type = other DNA

SEQ ID NO: 2706 - DNA, 70 bp, synthetic construct
  misc_feature 1..70: note = Description of Artificial Sequence: Synthetic oligonucleotide
  source 1..70: mol_type = other DNA
gtctagtgcaagctaacagttgcttttatcacaggctccaggcctctgattagggtgggggcgtgggtgg

SEQ ID NO: 2707 - DNA, 79 bp, synthetic construct; identical to SEQ ID NO: 2694
  misc_feature 1..79: note = Description of Artificial Sequence: Synthetic oligonucleotide
  source 1..79: mol_type = other DNA

SEQ ID NO: 2708 - DNA, 75 bp, synthetic construct; identical to SEQ ID NO: 2697
  misc_feature 1..75: note = Description of Artificial Sequence: Synthetic oligonucleotide
  source 1..75: mol_type = other DNA

SEQ ID NO: 2709 - DNA, 76 bp, synthetic construct; identical to SEQ ID NO: 2695
  misc_feature 1..76: note = Description of Artificial Sequence: Synthetic oligonucleotide
  source 1..76: mol_type = other DNA

SEQ ID NO: 2710 - DNA, 81 bp, synthetic construct; identical to SEQ ID NO: 2696
  misc_feature 1..81: note = Description of Artificial Sequence: Synthetic oligonucleotide
  source 1..81: mol_type = other DNA

SEQ ID NO: 2711 - DNA, 53 bp, synthetic construct
  misc_feature 1..53: note = Description of Artificial Sequence: Synthetic oligonucleotide
  source 1..53: mol_type = other DNA
gtctagtgcaagctaacagttgcttttatcacaggctccaggggcgtgggtgg

SEQ ID NO: 2712 - DNA, 50 bp, synthetic construct
  misc_feature 1..50: note = Description of Artificial Sequence: Synthetic oligonucleotide
  source 1..50: mol_type = other DNA
gtctagtgcaagctaacagttgcttttatcacaggctccagcgtgggtgg

SEQ ID NO: 2713 - DNA, 63 bp, synthetic construct
  misc_feature 1..63: note = Description of Artificial Sequence: Synthetic oligonucleotide
  source 1..63: mol_type = other DNA
gtctagtgcaagctaacagttgcttttatcacaggcctctgattagggtgggggcgtgggtgg

SEQ ID NO: 2714 - DNA, 75 bp, synthetic construct; identical to SEQ ID NO: 2697
  misc_feature 1..75: note = Description of Artificial Sequence: Synthetic oligonucleotide
  source 1..75: mol_type = other DNA

SEQ ID NO: 2715 - DNA, 76 bp, synthetic construct; identical to SEQ ID NO: 2695
  misc_feature 1..76: note = Description of Artificial Sequence: Synthetic oligonucleotide
  source 1..76: mol_type = other DNA

SEQ ID NO: 2716 - DNA, 79 bp, synthetic construct; identical to SEQ ID NO: 2694
  misc_feature 1..79: note = Description of Artificial Sequence: Synthetic oligonucleotide
  source 1..79: mol_type = other DNA

SEQ ID NO: 2717 - DNA, 81 bp, synthetic construct; identical to SEQ ID NO: 2696
  misc_feature 1..81: note = Description of Artificial Sequence: Synthetic oligonucleotide
  source 1..81: mol_type = other DNA

SEQ ID NO: 2718 - DNA, 82 bp, synthetic construct
  misc_feature 1..82: note = Description of Artificial Sequence: Synthetic oligonucleotide
  source 1..82: mol_type = other DNA
gtctagtgcaagctaacagttgcttttatcacaggctccaggaagagggtttggcctctgattagggtgggggcgtgggtgg

SEQ ID NO: 2719 - DNA, 64 bp, synthetic construct
  misc_feature 1..64: note = Description of Artificial Sequence: Synthetic oligonucleotide
  source 1..64: mol_type = other DNA
gtctagtgcaagctaacagttgcttttatcacaggctccaggattagggtgggggcgtgggtgg

SEQ ID NO: 2720 - DNA, 78 bp, synthetic construct; identical to SEQ ID NO: 2700
  misc_feature 1..78: note = Description of Artificial Sequence: Synthetic oligonucleotide
  source 1..78: mol_type = other DNA

SEQ ID NO: 2721 - DNA, 79 bp, synthetic construct
  misc_feature 1..79: note = Description of Artificial Sequence: Synthetic oligonucleotide
  source 1..79: mol_type = other DNA
tatcacaggctccaggaagggtttggcctctgattaggtgggggcgtgggtggggtagaagaggactggcagacctctc

SEQ ID NO: 2722 - DNA, 64 bp, synthetic construct
  misc_feature 1..64: note = Description of Artificial Sequence: Synthetic oligonucleotide
  source 1..64: mol_type = other DNA
tatcacaggctccaggaagggtttgggggcgtgggtggggtagaagaggactggcagacctctc

SEQ ID NO: 2723 - DNA, 61 bp, synthetic construct
  misc_feature 1..61: note = Description of Artificial Sequence: Synthetic oligonucleotide
  source 1..61: mol_type = other DNA
tatcacaggctccaggaagggtttggcgtgggtggggtagaagaggactggcagacctctc

SEQ ID NO: 2724 - DNA, 78 bp, synthetic construct
  misc_feature 1..78: note = Description of Artificial Sequence: Synthetic oligonucleotide
  source 1..78: mol_type = other DNA
tatcacaggctccaggaagggtttggcctctgattggtgggggcgtgggtggggtagaagaggactggcagacctctc

SEQ ID NO: 2725 - DNA, 57 bp, synthetic construct
  misc_feature 1..57: note = Description of Artificial Sequence: Synthetic oligonucleotide
  source 1..57: mol_type = other DNA
tatcacaggctccaggaaggggcgtgggtggggtagaagaggactggcagacctctc

SEQ ID NO: 2726 - DNA, 74 bp, synthetic construct
  misc_feature 1..74: note = Description of Artificial Sequence: Synthetic oligonucleotide
  source 1..74: mol_type = other DNA
tatcacaggctccaggaagggtttggcctctggtgggggcgtgggtggggtagaagaggactggcagacctctc

SEQ ID NO: 2727 - DNA, 71 bp, synthetic construct
  misc_feature 1..71: note = Description of Artificial Sequence: Synthetic oligonucleotide
  source 1..71: mol_type = other DNA
tatcacaggctccaggaagggtttggcctctgggggcgtgggtggggtagaagaggactggcagacctctc

SEQ ID NO: 2728 - DNA, 79 bp, synthetic construct; identical to SEQ ID NO: 2721
  misc_feature 1..79: note = Description of Artificial Sequence: Synthetic oligonucleotide
  source 1..79: mol_type = other DNA

SEQ ID NO: 2729 - DNA, 67 bp, synthetic construct
  misc_feature 1..67: note = Description of Artificial Sequence: Synthetic oligonucleotide
  source 1..67: mol_type = other DNA
tatcacaggctccaggaagggtttggtgggggcgtgggtggggtagaagaggactggcagacctctc

SEQ ID NO: 2730 - DNA, 78 bp, synthetic construct; identical to SEQ ID NO: 2724
  misc_feature 1..78: note = Description of Artificial Sequence: Synthetic oligonucleotide
  source 1..78: mol_type = other DNA

SEQ ID NO: 2731 - DNA, 61 bp, synthetic construct; identical to SEQ ID NO: 2723
  misc_feature 1..61: note = Description of Artificial Sequence: Synthetic oligonucleotide
  source 1..61: mol_type = other DNA

SEQ ID NO: 2732 - DNA, 64 bp, synthetic construct; identical to SEQ ID NO: 2722
  misc_feature 1..64: note = Description of Artificial Sequence: Synthetic oligonucleotide
  source 1..64: mol_type = other DNA

SEQ ID NO: 2733 - DNA, 81 bp, synthetic construct
  misc_feature 1..81: note = Description of Artificial Sequence: Synthetic oligonucleotide
  source 1..81: mol_type = other DNA
tatcacaggctccaggaagggtttggcctctgattagaggtgggggcgtgggtggggtagaagaggactggcagacctctc

SEQ ID NO: 2734 - DNA, 78 bp, synthetic construct
  misc_feature 1..78: note = Description of Artificial Sequence: Synthetic oligonucleotide
  source 1..78: mol_type = other DNA
tatcacaggctccaggaagggtttggcctctgattagtgggggcgtgggtggggtagaagaggactggcagacctctc

SEQ ID NO: 2735 - DNA, 78 bp, synthetic construct; identical to SEQ ID NO: 2734
  misc_feature 1..78: note = Description of Artificial Sequence: Synthetic oligonucleotide
  source 1..78: mol_type = other DNA

SEQ ID NO: 2736 - DNA, 79 bp, synthetic construct; identical to SEQ ID NO: 2721
  misc_feature 1..79: note = Description of Artificial Sequence: Synthetic oligonucleotide
  source 1..79: mol_type = other DNA

SEQ ID NO: 2737 - DNA, 51 bp, synthetic construct
  misc_feature 1..51: note = Description of Artificial Sequence: Synthetic oligonucleotide
  source 1..51: mol_type = other DNA
tatcacaggctccaggaagggtttggcctctgaaggactggcagacctctc

SEQ ID NO: 2738 - DNA, 81 bp, synthetic construct; identical to SEQ ID NO: 2733
  misc_feature 1..81: note = Description of Artificial Sequence: Synthetic oligonucleotide
  source 1..81: mol_type = other DNA

SEQ ID NO: 2739 - DNA, 64 bp, synthetic construct; identical to SEQ ID NO: 2722
  misc_feature 1..64: note = Description of Artificial Sequence: Synthetic oligonucleotide
  source 1..64: mol_type = other DNA

SEQ ID NO: 2740 - DNA, 71 bp, synthetic construct; identical to SEQ ID NO: 2727
  misc_feature 1..71: note = Description of Artificial Sequence: Synthetic oligonucleotide
  source 1..71: mol_type = other DNA

SEQ ID NO: 2741 - DNA, 74 bp, synthetic construct
  misc_feature 1..74: note = Description of Artificial Sequence: Synthetic oligonucleotide
  source 1..74: mol_type = other DNA
tatcacaggctccaggaagggtttggcctctgattagggcgtgggtggggtagaagaggactggcagacctctc

SEQ ID NO: 2742 - DNA, 67 bp, synthetic construct; identical to SEQ ID NO: 2729
  misc_feature 1..67: note = Description of Artificial Sequence: Synthetic oligonucleotide
  source 1..67: mol_type = other DNA

SEQ ID NO: 2743 - DNA, 79 bp, synthetic construct; identical to SEQ ID NO: 2721
  misc_feature 1..79: note = Description of Artificial Sequence: Synthetic oligonucleotide
  source 1..79: mol_type = other DNA

SEQ ID NO: 2744 - DNA, 78 bp, synthetic construct; identical to SEQ ID NO: 2724
  misc_feature 1..78: note = Description of Artificial Sequence: Synthetic oligonucleotide
  source 1..78: mol_type = other DNA

SEQ ID NO: 2745 - DNA, 71 bp, synthetic construct; identical to SEQ ID NO: 2727
  misc_feature 1..71: note = Description of Artificial Sequence: Synthetic oligonucleotide
  source 1..71: mol_type = other DNA

SEQ ID NO: 2746 - DNA, 64 bp, synthetic construct; identical to SEQ ID NO: 2722
  misc_feature 1..64: note = Description of Artificial Sequence: Synthetic oligonucleotide
  source 1..64: mol_type = other DNA

SEQ ID NO: 2747 - DNA, 61 bp, synthetic construct; identical to SEQ ID NO: 2723
  misc_feature 1..61: note = Description of Artificial Sequence: Synthetic oligonucleotide
  source 1..61: mol_type = other DNA

SEQ ID NO: 2748 - DNA, 58 bp, synthetic construct
  misc_feature 1..58: note = Description of Artificial Sequence: Synthetic oligonucleotide
  source 1..58: mol_type = other DNA
tatcacaggctccaggaagggggcgtgggtggggtagaagaggactggcagacctctc

SEQ ID NO: 2749 - DNA, 67 bp, synthetic construct; identical to SEQ ID NO: 2729
  misc_feature 1..67: note = Description of Artificial Sequence: Synthetic oligonucleotide
  source 1..67: mol_type = other DNA

SEQ ID NO: 2750 - DNA, 78 bp, synthetic construct; identical to SEQ ID NO: 2734
  misc_feature 1..78: note = Description of Artificial Sequence: Synthetic oligonucleotide
  source 1..78: mol_type = other DNA

SEQ ID NO: 2751 - DNA, 70 bp, synthetic construct
  misc_feature 1..70: note = Description of Artificial Sequence: Synthetic oligonucleotide
  source 1..70: mol_type = other DNA
atgtaaggaggatgagccacatggtatgggaggactctagggtcagagaaatatgggttatatccttcta

SEQ ID NO: 2752 - DNA, 79 bp, synthetic construct
  misc_feature 1..79: note = Description of Artificial Sequence: Synthetic oligonucleotide
  source 1..79: mol_type = other DNA
atgtaaggaggatgagccacatggtatgggaggtatctaaggactctagggtcagagaaatatgggttatatccttcta

SEQ ID NO: 2753 - DNA, 81 bp, synthetic construct
  misc_feature 1..81: note = Description of Artificial Sequence: Synthetic oligonucleotide
  source 1..81: mol_type = other DNA
atgtaaggaggatgagccacatggtatgggaggtataactaaggactctagggtcagagaaatatgggttatatccttcta

SEQ ID NO: 2754 - DNA, 67 bp, synthetic construct
  misc_feature 1..67: note = Description of Artificial Sequence: Synthetic oligonucleotide
  source 1..67: mol_type = other DNA
atgtaaggaggatgagccacatggtatgggactctagggtcagagaaatatgggttatatccttcta

SEQ ID NO: 2755 - DNA, 66 bp, synthetic construct
  misc_feature 1..66: note = Description of Artificial Sequence: Synthetic oligonucleotide
  source 1..66: mol_type = other DNA
atgtaaggaggatgagccacatggtaaggactctagggtcagagaaatatgggttatatccttcta

SEQ ID NO: 2756 - DNA, 75 bp, synthetic construct
  misc_feature 1..75: note = Description of Artificial Sequence: Synthetic oligonucleotide
  source 1..75: mol_type = other DNA
atgtaaggaggatgagccacatggtatgggaggtaaggactctagggtcagagaaatatgggttatatccttcta

SEQ ID NO: 2757 - DNA, 77 bp, synthetic construct
  misc_feature 1..77: note = Description of Artificial Sequence: Synthetic oligonucleotide
  source 1..77: mol_type = other DNA
atgtaaggaggatgagccacatggtatgggaggtataaggactctagggtcagagaaatatgggttatatccttcta

SEQ ID NO: 2758 - DNA, 79 bp, synthetic construct
  misc_feature 1..79: note = Description of Artificial Sequence: Synthetic oligonucleotide
  source 1..79: mol_type = other DNA
atgtaaggaggatgagccacatggtatgggaggtatataaggactctagggtcagagaaatatgggttatatccttcta

SEQ ID NO: 2759 - DNA, 71 bp, synthetic construct
  misc_feature 1..71: note = Description of Artificial Sequence: Synthetic oligonucleotide
  source 1..71: mol_type = other DNA
atgtaaggaggatgagccacatggtatggtaaggactctagggtcagagaaatatgggttatatccttcta

SEQ ID NO: 2760 - DNA, 78 bp, synthetic construct
  misc_feature 1..78: note = Description of Artificial Sequence: Synthetic oligonucleotide
  source 1..78: mol_type = other DNA
atgtaaggaggatgagccacatggtatgggaggtataaaggactctagggtcagagaaatatgggttatatccttcta

SEQ ID NO: 2761 - DNA, 81 bp, synthetic construct; identical to SEQ ID NO: 2753
  misc_feature 1..81: note = Description of Artificial Sequence: Synthetic oligonucleotide
  source 1..81: mol_type = other DNA

SEQ ID NO: 2762 - DNA, 70 bp, synthetic construct; identical to SEQ ID NO: 2751
  misc_feature 1..70: note = Description of Artificial Sequence: Synthetic oligonucleotide
  source 1..70: mol_type = other DNA

SEQ ID NO: 2763 - DNA, 67 bp, synthetic construct; identical to SEQ ID NO: 2754
  misc_feature 1..67: note = Description of Artificial Sequence: Synthetic oligonucleotide
  source 1..67: mol_type = other DNA

SEQ ID NO: 2764 - DNA, 79 bp, synthetic construct; identical to SEQ ID NO: 2752
  misc_feature 1..79: note = Description of Artificial Sequence: Synthetic oligonucleotide
  source 1..79: mol_type = other DNA

SEQ ID NO: 2765 - DNA, 66 bp, synthetic construct; identical to SEQ ID NO: 2755
  misc_feature 1..66: note = Description of Artificial Sequence: Synthetic oligonucleotide
  source 1..66: mol_type = other DNA

SEQ ID NO: 2766 - DNA, 75 bp, synthetic construct; identical to SEQ ID NO: 2756
  misc_feature 1..75: note = Description of Artificial Sequence: Synthetic oligonucleotide
  source 1..75: mol_type = other DNA

SEQ ID NO: 2767 - DNA, 77 bp, synthetic construct; identical to SEQ ID NO: 2757
  misc_feature 1..77: note = Description of Artificial Sequence: Synthetic oligonucleotide
  source 1..77: mol_type = other DNA

SEQ ID NO: 2768 - DNA, 78 bp, synthetic construct
  misc_feature 1..78: note = Description of Artificial Sequence: Synthetic oligonucleotide
  source 1..78: mol_type = other DNA
atgtaaggaggatgagccacatggtatgggaggtactaaggactctagggtcagagaaatatgggttatatccttcta

SEQ ID NO: 2769 - DNA, 79 bp, synthetic construct; identical to SEQ ID NO: 2758
  misc_feature 1..79: note = Description of Artificial Sequence: Synthetic oligonucleotide
  source 1..79: mol_type = other DNA

SEQ ID NO: 2770 - DNA, 43 bp, synthetic construct
  misc_feature 1..43: note = Description of Artificial Sequence: Synthetic oligonucleotide
  source 1..43: mol_type = other DNA
atgtaaggaggatgagccacatggtatgggttatatccttcta

SEQ ID NO: 2771 - DNA, 81 bp, synthetic construct; identical to SEQ ID NO: 2753
  misc_feature 1..81: note = Description of Artificial Sequence: Synthetic oligonucleotide
  source 1..81: mol_type = other DNA

SEQ ID NO: 2772 - DNA, 70 bp, synthetic construct; identical to SEQ ID NO: 2751
  misc_feature 1..70: note = Description of Artificial Sequence: Synthetic oligonucleotide
  source 1..70: mol_type = other DNA

SEQ ID NO: 2773 - DNA, 79 bp, synthetic construct; identical to SEQ ID NO: 2752
  misc_feature 1..79: note = Description of Artificial Sequence: Synthetic oligonucleotide
  source 1..79: mol_type = other DNA

SEQ ID NO: 2774 - DNA, 67 bp, synthetic construct; identical to SEQ ID NO: 2754
  misc_feature 1..67: note = Description of Artificial Sequence: Synthetic oligonucleotide
  source 1..67: mol_type = other DNA

SEQ ID NO: 2775 - DNA, 66 bp, synthetic construct; identical to SEQ ID NO: 2755
  misc_feature 1..66: note = Description of Artificial Sequence: Synthetic oligonucleotide
  source 1..66: mol_type = other DNA

SEQ ID NO: 2776 - DNA, 75 bp, synthetic construct; identical to SEQ ID NO: 2756
  misc_feature 1..75: note = Description of Artificial Sequence: Synthetic oligonucleotide
  source 1..75: mol_type = other DNA

SEQ ID NO: 2777 - DNA, 78 bp, synthetic construct; identical to SEQ ID NO: 2768
  misc_feature 1..78: note = Description of Artificial Sequence: Synthetic oligonucleotide
  source 1..78: mol_type = other DNA

SEQ ID NO: 2778 - DNA, 77 bp, synthetic construct; identical to SEQ ID NO: 2757
  misc_feature 1..77: note = Description of Artificial Sequence: Synthetic oligonucleotide
  source 1..77: mol_type = other DNA

SEQ ID NO: 2779 - DNA, 79 bp, synthetic construct; identical to SEQ ID NO: 2758
  misc_feature 1..79: note = Description of Artificial Sequence: Synthetic oligonucleotide
  source 1..79: mol_type = other DNA

SEQ ID NO: 2780 - DNA, 46 bp, synthetic construct
  misc_feature 1..46: note = Description of Artificial Sequence: Synthetic oligonucleotide
  source 1..46: mol_type = other DNA
atgtaaggaggatgagccacatggtatgggaggttatatccttcta

SEQ ID NO: 2781 - DNA, 70 bp, synthetic construct; identical to SEQ ID NO: 2751
  misc_feature 1..70: note = Description of Artificial Sequence: Synthetic oligonucleotide
  source 1..70: mol_type = other DNA

SEQ ID NO: 2782 - DNA, 79 bp, synthetic construct; identical to SEQ ID NO: 2752
  misc_feature 1..79: note = Description of Artificial Sequence: Synthetic oligonucleotide
  source 1..79: mol_type = other DNA

SEQ ID NO: 2783 - DNA, 81 bp, synthetic construct; identical to SEQ ID NO: 2753
  misc_feature 1..81: note = Description of Artificial Sequence: Synthetic oligonucleotide
  source 1..81: mol_type = other DNA

SEQ ID NO: 2784 - DNA, 67 bp, synthetic construct; identical to SEQ ID NO: 2754
  misc_feature 1..67: note = Description of Artificial Sequence: Synthetic oligonucleotide
  source 1..67: mol_type = other DNA

SEQ ID NO: 2785 - DNA, 66 bp, synthetic construct; identical to SEQ ID NO: 2755
  misc_feature 1..66: note = Description of Artificial Sequence: Synthetic oligonucleotide
  source 1..66: mol_type = other DNA

SEQ ID NO: 2786 - DNA, 75 bp, synthetic construct; identical to SEQ ID NO: 2756
  misc_feature 1..75: note = Description of Artificial Sequence: Synthetic oligonucleotide
  source 1..75: mol_type = other DNA

SEQ ID NO: 2787 - DNA, 77 bp, synthetic construct; identical to SEQ ID NO: 2757
  misc_feature 1..77: note = Description of Artificial Sequence: Synthetic oligonucleotide
  source 1..77: mol_type = other DNA

SEQ ID NO: 2788 - DNA, 78 bp, synthetic construct; identical to SEQ ID NO: 2768
  misc_feature 1..78: note = Description of Artificial Sequence: Synthetic oligonucleotide
  source 1..78: mol_type = other DNA

SEQ ID NO: 2789 - DNA, 66 bp, synthetic construct
  misc_feature 1..66: note = Description of Artificial Sequence: Synthetic oligonucleotide
  source 1..66: mol_type = other DNA
atgtaaggaggatgagccacatggtatggactctagggtcagagaaatatgggttatatccttcta

SEQ ID NO: 2790 - DNA, 79 bp, synthetic construct; identical to SEQ ID NO: 2758
  misc_feature 1..79: note = Description of Artificial Sequence: Synthetic oligonucleotide
  source 1..79: mol_type = other DNA

SEQ ID NO: 2791 - DNA, 79 bp, synthetic construct; identical to SEQ ID NO: 2752
  misc_feature 1..79: note = Description of Artificial Sequence: Synthetic oligonucleotide
  source 1..79: mol_type = other DNA

SEQ ID NO: 2792 - DNA, 81 bp, synthetic construct; identical to SEQ ID NO: 2753
  misc_feature 1..81: note = Description of Artificial Sequence: Synthetic oligonucleotide
  source 1..81: mol_type = other DNA

SEQ ID NO: 2793 - DNA, 70 bp, synthetic construct; identical to SEQ ID NO: 2751
  misc_feature 1..70: note = Description of Artificial Sequence: Synthetic oligonucleotide
  source 1..70: mol_type = other DNA

SEQ ID NO: 2794 - DNA, 67 bp, synthetic construct; identical to SEQ ID NO: 2754
  misc_feature 1..67: note = Description of Artificial Sequence: Synthetic oligonucleotide
  source 1..67: mol_type = other DNA

SEQ ID NO: 2795 - DNA, 66 bp, synthetic construct; identical to SEQ ID NO: 2755
  misc_feature 1..66: note = Description of Artificial Sequence: Synthetic oligonucleotide
  source 1..66: mol_type = other DNA

SEQ ID NO: 2796 - DNA, 77 bp, synthetic construct; identical to SEQ ID NO: 2757
  misc_feature 1..77: note = Description of Artificial Sequence: Synthetic oligonucleotide
  source 1..77: mol_type = other DNA

SEQ ID NO: 2797 - DNA, 78 bp, synthetic construct; identical to SEQ ID NO: 2768
  misc_feature 1..78: note = Description of Artificial Sequence: Synthetic oligonucleotide
  source 1..78: mol_type = other DNA

SEQ ID NO: 2798 - DNA, 79 bp, synthetic construct; identical to SEQ ID NO: 2758
  misc_feature 1..79: note = Description of Artificial Sequence: Synthetic oligonucleotide
  source 1..79: mol_type = other DNA

SEQ ID NO: 2799 - DNA, 75 bp, synthetic construct; identical to SEQ ID NO: 2756
  misc_feature 1..75: note = Description of Artificial Sequence: Synthetic oligonucleotide
  source 1..75: mol_type = other DNA

SEQ ID NO: 2800 - DNA, 68 bp, synthetic construct
  misc_feature 1..68: note = Description of Artificial Sequence: Synthetic oligonucleotide
  source 1..68: mol_type = other DNA
atgtaaggaggatgagccacatggtataaggactctagggtcagagaaatatgggttatatccttcta

SEQ ID NO: 2801 - DNA, 70 bp, synthetic construct; identical to SEQ ID NO: 2751
  misc_feature 1..70: note = Description of Artificial Sequence: Synthetic oligonucleotide
  source 1..70: mol_type = other DNA

SEQ ID NO: 2802 - DNA, 79 bp, synthetic construct; identical to SEQ ID NO: 2752
  misc_feature 1..79: note = Description of Artificial Sequence: Synthetic oligonucleotide
  source 1..79: mol_type = other DNA

SEQ ID NO: 2803 - DNA, 81 bp, synthetic construct; identical to SEQ ID NO: 2753
  misc_feature 1..81: note = Description of Artificial Sequence: Synthetic oligonucleotide
  source 1..81: mol_type = other DNA

SEQ ID NO: 2804 - DNA, 67 bp, synthetic construct; identical to SEQ ID NO: 2754
  misc_feature 1..67: note = Description of Artificial Sequence: Synthetic oligonucleotide
  source 1..67: mol_type = other DNA

SEQ ID NO: 2805 - DNA, 66 bp, synthetic construct; identical to SEQ ID NO: 2755
  misc_feature 1..66: note = Description of Artificial Sequence: Synthetic oligonucleotide
  source 1..66: mol_type = other DNA

SEQ ID NO: 2806 - DNA, 75 bp, synthetic construct; identical to SEQ ID NO: 2756
  misc_feature 1..75: note = Description of Artificial Sequence: Synthetic oligonucleotide
  source 1..75: mol_type = other DNA

SEQ ID NO: 2807 - DNA, 77 bp, synthetic construct; identical to SEQ ID NO: 2757
  misc_feature 1..77: note = Description of Artificial Sequence: Synthetic oligonucleotide
  source 1..77: mol_type = other DNA

SEQ ID NO: 2808 - DNA, 78 bp, synthetic construct; identical to SEQ ID NO: 2768
  misc_feature 1..78: note = Description of Artificial Sequence: Synthetic oligonucleotide
  source 1..78: mol_type = other DNA

SEQ ID NO: 2809 - DNA, 79 bp, synthetic construct; identical to SEQ ID NO: 2758
  misc_feature 1..79: note = Description of Artificial Sequence: Synthetic oligonucleotide
  source 1..79: mol_type = other DNA

SEQ ID NO: 2810 - DNA, 66 bp, synthetic construct; identical to SEQ ID NO: 2789
  misc_feature 1..66: note = Description of Artificial Sequence: Synthetic oligonucleotide
  source 1..66: mol_type = other DNA

SEQ ID NO: 2811 - RNA, 20 nt, synthetic construct
  misc_feature 1..20: note = Description of Artificial Sequence: Synthetic oligonucleotide
  source 1..20: mol_type = other RNA
ggccacggagcgagacatct

SEQ ID NO: 2812 - DNA, 21 bp, synthetic construct
  misc_feature 1..21: note = Description of Artificial Sequence: Synthetic primer
  source 1..21: mol_type = other DNA
cagacagcaaactcacccagt

SEQ ID NO: 2813 - DNA, 20 bp, synthetic construct
  misc_feature 1..20: note = Description of Artificial Sequence: Synthetic primer
  source 1..20: mol_type = other DNA
ctgacgcttatcgacgccct

SEQ ID NO: 2814 - DNA, 25 bp, synthetic construct
  misc_feature 1..25: note = Description of Artificial Sequence: Synthetic primer
  source 1..25: mol_type = other DNA
agctccaaactctcaaaccacaggg

SEQ ID NO: 2815 - DNA, 25 bp, synthetic construct
  misc_feature 1..25: note = Description of Artificial Sequence: Synthetic primer
  source 1..25: mol_type = other DNA
tacaattttgggagtccacacggca

SEQ ID NO: 2816 - DNA, 25 bp, synthetic construct
  misc_feature 1..25: note = Description of Artificial Sequence: Synthetic primer
  source 1..25: mol_type = other DNA
agctccaaactctcaaaccacaggg

SEQ ID NO: 2817 - DNA, 25 bp, synthetic construct
  misc_feature 1..25: note = Description of Artificial Sequence: Synthetic primer
  source 1..25: mol_type = other DNA
tacaattttgggagtccacacggca

SEQ ID NO: 2818 - RNA, 42 nt, synthetic construct; identical to SEQ ID NO: 2010
  misc_feature 1..42: note = Description of Artificial Sequence: Synthetic oligonucleotide
  misc_difference 1..20: note = modified_base - a, c, u, g, unknown or other
  source 1..42: mol_type = other RNA

SEQ ID NO: 2819 - DNA, 33 bp, synthetic construct
  misc_feature 1..33: note = Description of Artificial Sequence: Synthetic primer
  source 1..33: mol_type = other DNA
tcgtcggcagcgtcagatgtgtataagagacag

SEQ ID NO: 2820 - DNA, 34 bp, synthetic construct
  misc_feature 1..34: note = Description of Artificial Sequence: Synthetic primer
  source 1..34: mol_type = other DNA
gtctcgtgggctcggagatgtgtataagagacag

SEQ ID NO: 2821 - DNA, 51 bp, synthetic construct
  misc_feature 1..51: note = Description of Artificial Sequence: Synthetic primer
  misc_difference 30..37: note = modified_base - a, c, t, g, unknown or other
  source 1..51: mol_type = other DNA
aatgatacggcgaccaccgagatctacacnnnnnnnntcgtcggcagcgtc

SEQ ID NO: 2822 - DNA, 47 bp, synthetic construct
  misc_feature 1..47: note = Description of Artificial Sequence: Synthetic primer
  misc_difference 25..32: note = modified_base - a, c, t, g, unknown or other
  source 1..47: mol_type = other DNA
caagcagaagacggcatacgagatnnnnnnnngtctcgtgggctcgg

SEQ ID NO: 2823 - DNA, 21 bp, synthetic construct
  misc_feature 1..21: note = Description of Artificial Sequence: Synthetic primer
  source 1..21: mol_type = other DNA
caagcagaagacggcatacga

SEQ ID NO: 2824 - DNA, 22 bp, synthetic construct
  misc_feature 1..22: note = Description of Artificial Sequence: Synthetic primer
  source 1..22: mol_type = other DNA
aatgatacggcgaccaccgaga

SEQ ID NO: 2825 - DNA, 23 bp, synthetic construct
  misc_feature 1..23: note = Description of Artificial Sequence: Synthetic oligonucleotide
  source 1..23: mol_type = other DNA
ctcacctccaccctaatcagagg

SEQ ID NO: 2826 - DNA, 23 bp, synthetic construct
  misc_feature 1..23: note = Description of Artificial Sequence: Synthetic oligonucleotide
  source 1..23: mol_type = other DNA
cacgcccacaccttaatcagggg

SEQ ID NO: 2827 - DNA, 23 bp, synthetic construct
  misc_feature 1..23: note = Description of Artificial Sequence: Synthetic oligonucleotide
  source 1..23: mol_type = other DNA
cacgacccaaccctaatcagagg

SEQ ID NO: 2828 - DNA, 23 bp, synthetic construct
  misc_feature 1..23: note = Description of Artificial Sequence: Synthetic oligonucleotide
  source 1..23: mol_type = other DNA
ctagcccctaccctaataagtgg

SEQ ID NO: 2829 - DNA, 23 bp, synthetic construct
  misc_feature 1..23: note = Description of Artificial Sequence: Synthetic oligonucleotide
  source 1..23: mol_type = other DNA
tttataacaggctccagaaatgg

SEQ ID NO: 2830 - DNA, 23 bp, synthetic construct
  misc_feature 1..23: note = Description of Artificial Sequence: Synthetic oligonucleotide
  source 1..23: mol_type = other DNA
catatcacaggccccaggagggg

SEQ ID NO: 2831 - DNA, 23 bp, synthetic construct
  misc_feature 1..23: note = Description of Artificial Sequence: Synthetic oligonucleotide
  source 1..23: mol_type = other DNA
tggggtggggagatatgaagagg

SEQ ID NO: 2832 - DNA, 23 bp, synthetic construct
  misc_feature 1..23: note = Description of Artificial Sequence: Synthetic oligonucleotide
  source 1..23: mol_type = other DNA
ggaggtggggagagatgtagagg

SEQ ID NO: 2833 - DNA, 23 bp, synthetic construct
  misc_feature 1..23: note = Description of Artificial Sequence: Synthetic oligonucleotide
  source 1..23: mol_type = other DNA
catgcggaaagagatgcggttgg

SEQ ID NO: 2834 - DNA, 23 bp, synthetic construct
  misc_feature 1..23: note = Description of Artificial Sequence: Synthetic oligonucleotide
  source 1..23: mol_type = other DNA
aggtacctcaaactcagcatagg

SEQ ID NO: 2835 - DNA, 23 bp, synthetic construct
  misc_feature 1..23: note = Description of Artificial Sequence: Synthetic oligonucleotide
  source 1..23: mol_type = other DNA
agagaccccagactcagcatagg

SEQ ID NO: 2836 - DNA, 23 bp, synthetic construct
  misc_feature 1..23: note = Description of Artificial Sequence: Synthetic oligonucleotide
  source 1..23: mol_type = other DNA
atggtatgagaaatatactatgg

SEQ ID NO: 2837 - RNA, 42 nt, synthetic construct; identical to SEQ ID NO: 2010
  misc_feature 1..42: note = Description of Artificial Sequence: Synthetic oligonucleotide
  misc_difference 1..20: note = modified_base - a, c, u, g, unknown or other
  source 1..42: mol_type = other RNA

SEQ ID NO: 2838 - RNA, 100 nt, synthetic construct; identical to SEQ ID NO: 2013
  misc_feature 1..100: note = Description of Artificial Sequence: Synthetic polynucleotide
  misc_difference 1..20: note = modified_base - a, c, u, g, unknown or other
  source 1..100: mol_type = other RNA

SEQ ID NO: 2839 - RNA, 42 nt, synthetic construct; identical to SEQ ID NO: 2010
  misc_feature 1..42: note = Description of Artificial Sequence: Synthetic oligonucleotide
  misc_difference 1..20: note = modified_base - a, c, u, g, unknown or other
  source 1..42: mol_type = other RNA

SEQ ID NO: 2840 - RNA, 100 nt, synthetic construct; identical to SEQ ID NO: 2013
  misc_feature 1..100: note = Description of Artificial Sequence: Synthetic polynucleotide
  misc_difference 1..20: note = modified_base - a, c, u, g, unknown or other
  source 1..100: mol_type = other RNA

SEQ ID NO: 2841 - DNA, 93 bp, synthetic construct
  misc_feature 1..93: note = Description of Artificial Sequence: Synthetic oligonucleotide
  source 1..93: mol_type = other DNA
ctgtccacccatccatcacatataggcacctatcaggtaccagctactgtgttaggatctgtgttcccaactgacttgcctccccctgacgtc

SEQ ID NO: 2842 - DNA, 56 bp, synthetic construct
  misc_feature 1..56: note = Description of Artificial Sequence: Synthetic oligonucleotide
  source 1..56: mol_type = other DNA
cacccatccatcacatataggcacctatcaggtaccagctactgtgttaggatctg

SEQ ID NO: 2843 - DNA, 57 bp, synthetic construct
  misc_feature 1..57: note = Description of Artificial Sequence: Synthetic oligonucleotide
  source 1..57: mol_type = other DNA
cacccatccatcacatataggcaccttatcaggtaccagctactgtgttaggatctg

SEQ ID NO: 2844 - DNA, 45 bp, synthetic construct
  misc_feature 1..45: note = Description of Artificial Sequence: Synthetic oligonucleotide
  source 1..45: mol_type = other DNA
cacccatccatcacatataggcaccagctactgtgttaggatctg

SEQ ID NO: 2845 - DNA, 55 bp, synthetic construct
  misc_feature 1..55: note = Description of Artificial Sequence: Synthetic oligonucleotide
  source 1..55: mol_type = other DNA
cacccatccatcacatataggcaccatcaggtaccagctactgtgttaggatctg

SEQ ID NO: 2846 - DNA, 57 bp, synthetic construct; identical to SEQ ID NO: 2843
  misc_feature 1..57: note = Description of Artificial Sequence: Synthetic oligonucleotide
  source 1..57: mol_type = other DNA

SEQ ID NO: 2847 - DNA, 45 bp, synthetic construct; identical to SEQ ID NO: 2844
  misc_feature 1..45: note = Description of Artificial Sequence: Synthetic oligonucleotide
  source 1..45: mol_type = other DNA

SEQ ID NO: 2848 - DNA, 45 bp, synthetic construct
  misc_feature 1..45: note = Description of Artificial Sequence: Synthetic oligonucleotide
  source 1..45: mol_type = other DNA
cacccatccatcacatataggtaccagctactgtgttaggatctg

SEQ ID NO: 2849 - DNA, 57 bp, synthetic construct; identical to SEQ ID NO: 2843
  misc_feature 1..57: note = Description of Artificial Sequence: Synthetic oligonucleotide
  source 1..57: mol_type = other DNA

SEQ ID NO: 2850 - DNA, 45 bp, synthetic construct; identical to SEQ ID NO: 2844
  misc_feature 1..45: note = Description of Artificial Sequence: Synthetic oligonucleotide
  source 1..45: mol_type = other DNA

SEQ ID NO: 2851 - DNA, 45 bp, synthetic construct; identical to SEQ ID NO: 2848
  misc_feature 1..45: note = Description of Artificial Sequence: Synthetic oligonucleotide
  source 1..45: mol_type = other DNA

SEQ ID NO: 2852 - DNA, 57 bp, synthetic construct; identical to SEQ ID NO: 2843
  misc_feature 1..57: note = Description of Artificial Sequence: Synthetic oligonucleotide
  source 1..57: mol_type = other DNA

SEQ ID NO: 2853 - DNA, 45 bp, synthetic construct; identical to SEQ ID NO: 2844
  misc_feature 1..45: note = Description of Artificial Sequence: Synthetic oligonucleotide
  source 1..45: mol_type = other DNA

SEQ ID NO: 2854 - DNA, 45 bp, synthetic construct; identical to SEQ ID NO: 2848
  misc_feature 1..45: note = Description of Artificial Sequence: Synthetic oligonucleotide
  source 1..45: mol_type = other DNA

SEQ ID NO: 2855 - DNA, 56 bp, synthetic construct; identical to SEQ ID NO: 2842
  misc_feature 1..56: note = Description of Artificial Sequence: Synthetic oligonucleotide
  source 1..56: mol_type = other DNA

SEQ ID NO: 2856 - DNA, 57 bp, synthetic construct
  misc_feature 1..57: note = Description of Artificial Sequence: Synthetic oligonucleotide
  source 1..57: mol_type = other DNA
cacccatccatcacatataggcacctatcaaggtaccagctactgtgttaggatctg

SEQ ID NO: 2857 - DNA, 45 bp, synthetic construct; identical to SEQ ID NO: 2848
  misc_feature 1..45: note = Description of Artificial Sequence: Synthetic oligonucleotide
  source 1..45: mol_type = other DNA

SEQ ID NO: 2858 - DNA, 55 bp, synthetic construct
  misc_feature 1..55: note = Description of Artificial Sequence: Synthetic oligonucleotide
  source 1..55: mol_type = other DNA
cacccatccatcacatataggcacctatcggtaccagctactgtgttaggatctg

SEQ ID NO: 2859 - DNA, 57 bp, synthetic construct; identical to SEQ ID NO: 2856
  misc_feature 1..57: note = Description of Artificial Sequence: Synthetic oligonucleotide
  source 1..57: mol_type = other DNA

SEQ ID NO: 2860 - DNA, 45 bp, synthetic construct; identical to SEQ ID NO: 2844
  misc_feature 1..45: note = Description of Artificial Sequence: Synthetic oligonucleotide
  source 1..45: mol_type = other DNA

SEQ ID NO: 2861 - DNA, 55 bp, synthetic construct; identical to SEQ ID NO: 2858
  misc_feature 1..55: note = Description of Artificial Sequence: Synthetic oligonucleotide
  source 1..55: mol_type = other DNA

SEQ ID NO: 2862 - DNA, 57 bp, synthetic construct; identical to SEQ ID NO: 2856
  misc_feature 1..57: note = Description of Artificial Sequence: Synthetic oligonucleotide
  source 1..57: mol_type = other DNA

SEQ ID NO: 2863 - DNA, 55 bp, synthetic construct; identical to SEQ ID NO: 2858
  misc_feature 1..55: note = Description of Artificial Sequence: Synthetic oligonucleotide
  source 1..55: mol_type = other DNA

SEQ ID NO: 2864 - DNA, 45 bp, synthetic construct; identical to SEQ ID NO: 2844
  misc_feature 1..45: note = Description of Artificial Sequence: Synthetic oligonucleotide
  source 1..45: mol_type = other DNA

SEQ ID NO: 2865 - DNA, 57 bp, synthetic construct; identical to SEQ ID NO: 2856
  misc_feature 1..57: note = Description of Artificial Sequence: Synthetic oligonucleotide
  source 1..57: mol_type = other DNA

SEQ ID NO: 2866 - DNA, 45 bp, synthetic construct; identical to SEQ ID NO: 2844
  misc_feature 1..45: note = Description of Artificial Sequence: Synthetic oligonucleotide
  source 1..45: mol_type = other DNA

SEQ ID NO: 2867 - DNA, 55 bp, synthetic construct; identical to SEQ ID NO: 2858
  misc_feature 1..55: note = Description of Artificial Sequence: Synthetic oligonucleotide
  source 1..55: mol_type = other DNA

SEQ ID NO: 2868 - DNA, 60 bp, synthetic construct
  misc_feature 1..60: note = Description of Artificial Sequence: Synthetic oligonucleotide
  source 1..60: mol_type = other DNA
ggcacctatcaggtaccagctactgtgttaggatctgtgttcccaactgacttgcctccc

SEQ ID NO: 2869 - DNA, 61 bp, synthetic construct
  misc_feature 1..61: note = Description of Artificial Sequence: Synthetic oligonucleotide
  source 1..61: mol_type = other DNA
ggcacctatcaggtaccagctactgttgttaggatctgtgttcccaactgacttgcctccc

SEQ ID NO: 2870 - DNA, 58 bp, synthetic construct
  misc_feature 1..58: note = Description of Artificial Sequence: Synthetic oligonucleotide
  source 1..58: mol_type = other DNA
ggcacctatcaggtaccagctactgttaggatctgtgttcccaactgacttgcctccc

SEQ ID NO: 2871 - DNA, 48 bp, synthetic construct
  misc_feature 1..48: note = Description of Artificial Sequence: Synthetic oligonucleotide
  source 1..48: mol_type = other DNA
ggcacctatcaggtaccagctactgtgttcccaactgacttgcctccc

SEQ ID NO: 2872 - DNA, 61 bp, synthetic construct; identical to SEQ ID NO: 2869
  misc_feature 1..61: note = Description of Artificial Sequence: Synthetic oligonucleotide
  source 1..61: mol_type = other DNA

SEQ ID NO: 2873 - DNA, 58 bp, synthetic construct; identical to SEQ ID NO: 2870
  misc_feature 1..58: note = Description of Artificial Sequence: Synthetic oligonucleotide
  source 1..58: mol_type = other DNA

SEQ ID NO: 2874 - DNA, 48 bp, synthetic construct; identical to SEQ ID NO: 2871
  misc_feature 1..48: note = Description of Artificial Sequence: Synthetic oligonucleotide
  source 1..48: mol_type = other DNA

SEQ ID NO: 2875 - DNA, 61 bp, synthetic construct; identical to SEQ ID NO: 2869
  misc_feature 1..61: note = Description of Artificial Sequence: Synthetic oligonucleotide
  source 1..61: mol_type = other DNA

SEQ ID NO: 2876 - DNA, 58 bp, synthetic construct; identical to SEQ ID NO: 2870
  misc_feature 1..58: note = Description of Artificial Sequence: Synthetic oligonucleotide
  source 1..58: mol_type = other DNA

SEQ ID NO: 2877 - DNA, 48 bp, synthetic construct; identical to SEQ ID NO: 2871
  misc_feature 1..48: note = Description of Artificial Sequence: Synthetic oligonucleotide
  source 1..48: mol_type = other DNA

SEQ ID NO: 2878 - DNA, 61 bp, synthetic construct; identical to SEQ ID NO: 2869
  misc_feature 1..61: note = Description of Artificial Sequence: Synthetic oligonucleotide
  source 1..61: mol_type = other DNA

SEQ ID NO: 2879 - DNA, 58 bp, synthetic construct; identical to SEQ ID NO: 2870
  misc_feature 1..58: note = Description of Artificial Sequence: Synthetic oligonucleotide
  source 1..58: mol_type = other DNA

SEQ ID NO: 2880 - DNA, 48 bp, synthetic construct; identical to SEQ ID NO: 2871
  misc_feature 1..48: note = Description of Artificial Sequence: Synthetic oligonucleotide
  source 1..48: mol_type = other DNA

SEQ ID NO: 2881 - DNA, 60 bp, synthetic construct
  misc_feature 1..60: note = Description of Artificial Sequence: Synthetic oligonucleotide
  source 1..60: mol_type = other DNA
ttttcatctgtcgggctgtccacccatccatcacatataggcacctatcaggtaccagct

SEQ ID NO: 2882 - DNA, 58 bp, synthetic construct
  misc_feature 1..58: note = Description of Artificial Sequence: Synthetic oligonucleotide
  source 1..58: mol_type = other DNA
ttttcatctgtcgggctgtccacccatccatcatataggcacctatcaggtaccagct

SEQ ID NO: 2883 - DNA, 55 bp, synthetic construct
  misc_feature 1..55: note = Description of Artificial Sequence: Synthetic oligonucleotide
  source 1..55: mol_type = other DNA
ttttcatctgtcgggctgtccacccatccatataggcacctatcaggtaccagct

SEQ ID NO: 2884 - DNA, 43 bp, synthetic construct
  misc_feature 1..43: note = Description of Artificial Sequence: Synthetic oligonucleotide
  source 1..43: mol_type = other DNA
ttttcatctgtcgggctgtccacccatccatcaggtaccagct

SEQ ID NO: 2885 - DNA, 58 bp, synthetic construct; identical to SEQ ID NO: 2882
  misc_feature 1..58: note = Description of Artificial Sequence: Synthetic oligonucleotide
  source 1..58: mol_type = other DNA

SEQ ID NO: 2886 - DNA, 55 bp, synthetic construct; identical to SEQ ID NO: 2883
  misc_feature 1..55: note = Description of Artificial Sequence: Synthetic oligonucleotide
  source 1..55: mol_type = other DNA

SEQ ID NO: 2887 - DNA, 43 bp, synthetic construct; identical to SEQ ID NO: 2884
  misc_feature 1..43: note = Description of Artificial Sequence: Synthetic oligonucleotide
  source 1..43: mol_type = other DNA

SEQ ID NO: 2888 - DNA, 58 bp, synthetic construct; identical to SEQ ID NO: 2882
  misc_feature 1..58: note = Description of Artificial Sequence: Synthetic oligonucleotide
  source 1..58: mol_type = other DNA

SEQ ID NO: 2889 - DNA, 43 bp, synthetic construct; identical to SEQ ID NO: 2884
  misc_feature 1..43: note = Description of Artificial Sequence: Synthetic oligonucleotide
  source 1..43: mol_type = other DNA

SEQ ID NO: 2890 - DNA, 55 bp, synthetic construct; identical to SEQ ID NO: 2883
  misc_feature 1..55: note = Description of Artificial Sequence: Synthetic oligonucleotide
  source 1..55: mol_type = other DNA

SEQ ID NO: 2891 - DNA, 58 bp, synthetic construct; identical to SEQ ID NO: 2882
  misc_feature 1..58: note = Description of Artificial Sequence: Synthetic oligonucleotide
  source 1..58: mol_type = other DNA

SEQ ID NO: 2892 - DNA, 55 bp, synthetic construct; identical to SEQ ID NO: 2883
  misc_feature 1..55: note = Description of Artificial Sequence: Synthetic oligonucleotide
  source 1..55: mol_type = other DNA

SEQ ID NO: 2893 - DNA, 43 bp, synthetic construct; identical to SEQ ID NO: 2884
  misc_feature 1..43: note = Description of Artificial Sequence: Synthetic oligonucleotide
  source 1..43: mol_type = other DNA

SEQ ID NO: 2894 - DNA, 60 bp, synthetic construct
  misc_feature 1..60: note = Description of Artificial Sequence: Synthetic oligonucleotide
  source 1..60: mol_type = other DNA
cctgtgggcagtgccagatgaacttcccattgggggacattcttatttttatcgagcaca

SEQ ID NO: 2895 - DNA, 59 bp, synthetic construct
  misc_feature 1..59: note = Description of Artificial Sequence: Synthetic oligonucleotide
  source 1..59: mol_type = other DNA
cctgtgggcagtgccagatgaacttccattgggggacattcttatttttatcgagcaca

SEQ ID NO: 2896 - DNA, 58 bp, synthetic construct
  misc_feature 1..58: note = Description of Artificial Sequence: Synthetic oligonucleotide
  source 1..58: mol_type = other DNA
cctgtgggcagtgccagatgaacttcattgggggacattcttatttttatcgagcaca

SEQ ID NO: 2897 - DNA, 61 bp, synthetic construct
  misc_feature 1..61: note = Description of Artificial Sequence: Synthetic oligonucleotide
  source 1..61: mol_type = other DNA
cctgtgggcagtgccagatgaacttccccattgggggacattcttatttttatcgagcaca

SEQ ID NO: 2898 - DNA, 59 bp, synthetic construct; identical to SEQ ID NO: 2895
  misc_feature 1..59: note = Description of Artificial Sequence: Synthetic oligonucleotide
  source 1..59: mol_type = other DNA

SEQ ID NO: 2899 - DNA, 58 bp, synthetic construct; identical to SEQ ID NO: 2896
  misc_feature 1..58: note = Description of Artificial Sequence: Synthetic oligonucleotide
  source 1..58: mol_type = other DNA

SEQ ID NO: 2900 - DNA, 61 bp, synthetic construct; identical to SEQ ID NO: 2897
  misc_feature 1..61: note = Description of Artificial Sequence: Synthetic oligonucleotide
  source 1..61: mol_type = other DNA

SEQ ID NO: 2901 - DNA, 60 bp, synthetic construct
  misc_feature 1..60: note = Description of Artificial Sequence: Synthetic oligonucleotide
  source 1..60: mol_type = other DNA
ttttatcgagcacaaacggaaacaatgcaatggcagcctctgcttagaaaaagctgtgga

SEQ ID NO: 2902 - DNA, 55 bp, synthetic construct
  misc_feature 1..55: note = Description of Artificial Sequence: Synthetic oligonucleotide
  source 1..55: mol_type = other DNA
ttttatcgagcacaaacggaaacaatggcagcctctgcttagaaaaagctgtgga

SEQ ID NO: 2903 - DNA, 59 bp, synthetic construct
  misc_feature 1..59: note = Description of Artificial Sequence: Synthetic oligonucleotide
  source 1..59: mol_type = other DNA
ttttatcgagcacaaacggaaacaatgaatggcagcctctgcttagaaaaagctgtgga

SEQ ID NO: 2904 - DNA, 59 bp, synthetic construct
  misc_feature 1..59: note = Description of Artificial Sequence: Synthetic oligonucleotide
  source 1..59: mol_type = other DNA
ttttatcgagcacaaacggaaacaatcaatggcagcctctgcttagaaaaagctgtgga

SEQ ID NO: 2905 - DNA, 55 bp, synthetic construct; identical to SEQ ID NO: 2902
  misc_feature 1..55: note = Description of Artificial Sequence: Synthetic oligonucleotide
  source 1..55: mol_type = other DNA

SEQ ID NO: 2906 - DNA, 59 bp, synthetic construct; identical to SEQ ID NO: 2903
  misc_feature 1..59: note = Description of Artificial Sequence: Synthetic oligonucleotide
  source 1..59: mol_type = other DNA

SEQ ID NO: 2907 - DNA, 59 bp, synthetic construct; identical to SEQ ID NO: 2904
  misc_feature 1..59: note = Description of Artificial Sequence: Synthetic oligonucleotide
  source 1..59: mol_type = other DNA

SEQ ID NO: 2908 - DNA, 60 bp, synthetic construct
  misc_feature 1..60: note = Description of Artificial Sequence: Synthetic oligonucleotide
  source 1..60: mol_type = other DNA
atgagtgcagaatatgccccgcagggtatttgtaagttgagccttatttcttctacgaaa

SEQ ID NO: 2909 - DNA, 45 bp, synthetic construct
  misc_feature 1..45: note = Description of Artificial Sequence: Synthetic oligonucleotide
  source 1..45: mol_type = other DNA
atgagtgcagggtatttgtaagttgagccttatttcttctacaaa

SEQ ID NO: 2910 - DNA, 54 bp, synthetic construct
  misc_feature 1..54: note = Description of Artificial Sequence: Synthetic oligonucleotide
  source 1..54: mol_type = other DNA
atgagtgcagaatatgcagggtatttgtaagttgagccttatttcttctacaaa

SEQ ID NO: 2911 - DNA, 59 bp, synthetic construct
  misc_feature 1..59: note = Description of Artificial Sequence: Synthetic oligonucleotide
  source 1..59: mol_type = other DNA
atgagtgcagaatatgcccgcagggtatttgtaagttgagccttatttcttctacgaaa

SEQ ID NO: 2912 - DNA, 78 bp, synthetic construct
  misc_feature 1..78: note = Description of Artificial Sequence: Synthetic oligonucleotide
  source 1..78: mol_type = other DNA
gggcagtgccagatgaacttcccattgggggacattcttatttttatcgagcacaaacggaaacaatgcaatggcagc

SEQ ID NO: 2913 - DNA, 80 bp, synthetic construct
  misc_feature 1..80: note = Description of Artificial Sequence: Synthetic oligonucleotide
  source 1..80: mol_type = other DNA
gttttagagctagaaatagcaagttaaaataaggctagtccgttatcaacttgaaaaagtggcaccgagtcggtgctttt

SEQ ID NO: 2914 - DNA, 90 bp, synthetic construct
  misc_feature 1..90: note = Description of Artificial Sequence: Synthetic oligonucleotide
  source 1..90: mol_type = other DNA
gtttaagagctatgctggaaacagcatagcaagtttaaataaggctagtccgttatcaacttgaaaaagtggcaccgagtcggtgctttt

SEQ ID NO: 2915 - DNA, 42 bp, synthetic construct
  misc_feature 1..42: note = Description of Artificial Sequence: Synthetic oligonucleotide
  source 1..42: mol_type = other DNA
agtgccagatgaacttcccattgggggacattcttattttta

SEQ ID NO: 2916 - DNA, 41 bp, synthetic construct
  misc_feature 1..41: note = Description of Artificial Sequence: Synthetic oligonucleotide
  source 1..41: mol_type = other DNA
agtgccagatgaacttccattgggggacattcttattttta

SEQ ID NO: 2917 - DNA, 40 bp, synthetic construct
  misc_feature 1..40: note = Description of Artificial Sequence: Synthetic oligonucleotide
  source 1..40: mol_type = other DNA
agtgccagatgaacttcattgggggacattcttattttta

SEQ ID NO: 2918 - DNA, 43 bp, synthetic construct
  misc_feature 1..43: note = Description of Artificial Sequence: Synthetic oligonucleotide
  source 1..43: mol_type = other DNA
agtgccagatgaacttccccattgggggacattcttattttta

SEQ ID NO: 2919 - DNA, 41 bp, synthetic construct; identical to SEQ ID NO: 2916
  misc_feature 1..41: note = Description of Artificial Sequence: Synthetic oligonucleotide
  source 1..41: mol_type = other DNA

SEQ ID NO: 2920 - DNA, 40 bp, synthetic construct; identical to SEQ ID NO: 2917
  misc_feature 1..40: note = Description of Artificial Sequence: Synthetic oligonucleotide
  source 1..40: mol_type = other DNA

SEQ ID NO: 2921 - DNA, 43 bp, synthetic construct; identical to SEQ ID NO: 2918
  misc_feature 1..43: note = Description of Artificial Sequence: Synthetic oligonucleotide
  source 1..43: mol_type = other DNA

SEQ ID NO: 2922 - DNA, 60 bp, synthetic construct; identical to SEQ ID NO: 2894
  misc_feature 1..60: note = Description of Artificial Sequence: Synthetic oligonucleotide
  source 1..60: mol_type = other DNA

SEQ ID NO: 2923 - DNA, 59 bp, synthetic construct; identical to SEQ ID NO: 2895
  misc_feature 1..59: note = Description of Artificial Sequence: Synthetic oligonucleotide
  source 1..59: mol_type = other DNA

SEQ ID NO: 2924 - DNA, 58 bp, synthetic construct; identical to SEQ ID NO: 2896
  misc_feature 1..58: note = Description of Artificial Sequence: Synthetic oligonucleotide
  source 1..58: mol_type = other DNA

SEQ ID NO: 2925 - DNA, 61 bp, synthetic construct; identical to SEQ ID NO: 2897
  misc_feature 1..61: note = Description of Artificial Sequence: Synthetic oligonucleotide
  source 1..61: mol_type = other DNA

SEQ ID NO: 2926 - DNA, 59 bp, synthetic construct; identical to SEQ ID NO: 2895
  misc_feature 1..59: note = Description of Artificial Sequence: Synthetic oligonucleotide
  source 1..59: mol_type = other DNA

SEQ ID NO: 2927 - DNA, 58 bp, synthetic construct; identical to SEQ ID NO: 2896
  misc_feature 1..58: note = Description of Artificial Sequence: Synthetic oligonucleotide
  source 1..58: mol_type = other DNA

SEQ ID NO: 2928 - DNA, 61 bp, synthetic construct; identical to SEQ ID NO: 2897
  misc_feature 1..61: note = Description of Artificial Sequence: Synthetic oligonucleotide
  source 1..61: mol_type = other DNA

SEQ ID NO: 2929 - DNA, 59 bp, synthetic construct; identical to SEQ ID NO: 2895
  misc_feature 1..59: note = Description of Artificial Sequence: Synthetic oligonucleotide
  source 1..59: mol_type = other DNA

SEQ ID NO: 2930 - DNA, 58 bp, synthetic construct; identical to SEQ ID NO: 2896
  misc_feature 1..58: note = Description of Artificial Sequence: Synthetic oligonucleotide
  source 1..58: mol_type = other DNA

SEQ ID NO: 2931 - DNA, 55 bp, synthetic construct
  misc_feature 1..55: note = Description of Artificial Sequence: Synthetic oligonucleotide
  source 1..55: mol_type = other DNA
cctgtgggcagtgccagatgaacattgggggacattcttatttttatcgagcaca

SEQ ID NO: 2932 - DNA, 59 bp, synthetic construct; identical to SEQ ID NO: 2895
  misc_feature 1..59: note = Description of Artificial Sequence: Synthetic oligonucleotide
  source 1..59: mol_type = other DNA

SEQ ID NO: 2933 - DNA, 58 bp, synthetic construct; identical to SEQ ID NO: 2896
  misc_feature 1..58: note = Description of Artificial Sequence: Synthetic oligonucleotide
  source 1..58: mol_type = other DNA

SEQ ID NO: 2934 - DNA, 55 bp, synthetic construct; identical to SEQ ID NO: 2931
  misc_feature 1..55: note = Description of Artificial Sequence: Synthetic oligonucleotide
  source 1..55: mol_type = other DNA

SEQ ID NO: 2935 - DNA, 59 bp, synthetic construct; identical to SEQ ID NO: 2895
  misc_feature 1..59: note = Description of Artificial Sequence: Synthetic oligonucleotide
  source 1..59: mol_type = other DNA

SEQ ID NO: 2936 - DNA, 61 bp, synthetic construct; identical to SEQ ID NO: 2897
  misc_feature 1..61: note = Description of Artificial Sequence: Synthetic oligonucleotide
  source 1..61: mol_type = other DNA

SEQ ID NO: 2937 - DNA, 58 bp, synthetic construct; identical to SEQ ID NO: 2896
  misc_feature 1..58: note = Description of Artificial Sequence: Synthetic oligonucleotide
  source 1..58: mol_type = other DNA

SEQ ID NO: 2938 - DNA, 59 bp, synthetic construct; identical to SEQ ID NO: 2895
  misc_feature 1..59: note = Description of Artificial Sequence: Synthetic oligonucleotide
  source 1..59: mol_type = other DNA

SEQ ID NO: 2939 - DNA, 61 bp, synthetic construct; identical to SEQ ID NO: 2897
  misc_feature 1..61: note = Description of Artificial Sequence: Synthetic oligonucleotide
  source 1..61: mol_type = other DNA

SEQ ID NO: 2940 - DNA, 58 bp, synthetic construct
  misc_feature 1..58: note = Description of Artificial Sequence: Synthetic oligonucleotide
  source 1..58: mol_type = other DNA
cctgtgggcagtgccagatgaacttccttgggggacattcttatttttatcgagcaca

SEQ ID NO: 2941 - DNA, 59 bp, synthetic construct; identical to SEQ ID NO: 2895
  misc_feature 1..59: note = Description of Artificial Sequence: Synthetic oligonucleotide
  source 1..59: mol_type = other DNA

SEQ ID NO: 2942 - DNA, 55 bp, synthetic construct; identical to SEQ ID NO: 2931
  misc_feature 1..55: note = Description of Artificial Sequence: Synthetic oligonucleotide
  source 1..55: mol_type = other DNA

SEQ ID NO: 2943 - DNA, 58 bp, synthetic construct; identical to SEQ ID NO: 2896
  misc_feature 1..58: note = Description of Artificial Sequence: Synthetic oligonucleotide
  source 1..58: mol_type = other DNA

SEQ ID NO: 2944 - DNA, 59 bp, synthetic construct; identical to SEQ ID NO: 2895
  misc_feature 1..59: note = Description of Artificial Sequence: Synthetic oligonucleotide
  source 1..59: mol_type = other DNA

SEQ ID NO: 2945 - DNA, 55 bp, synthetic construct; identical to SEQ ID NO: 2931
  misc_feature 1..55: note = Description of Artificial Sequence: Synthetic oligonucleotide
  source 1..55: mol_type = other DNA

SEQ ID NO: 2946 - DNA, 58 bp, synthetic construct; identical to SEQ ID NO: 2896
  misc_feature 1..58: note = Description of Artificial Sequence: Synthetic oligonucleotide
  source 1..58: mol_type = other DNA

SEQ ID NO: 2947 - DNA, 95 bp, synthetic construct
  misc_feature 1..95: note = Description of Artificial Sequence: Synthetic oligonucleotide
  source 1..95: mol_type = other DNA
gggcagtgccagatgaacttcccattgggggacattcttatttttatcgagcacaaacggaaacaatgcaatggcagcctctgcttagaaaaagc

SEQ ID NO: 2948 - DNA, 49 bp, synthetic construct
  misc_feature 1..49: note = Description of Artificial Sequence: Synthetic oligonucleotide
  source 1..49: mol_type = other DNA
gggcagtgccagatgaacttcccaatggcagcctctgcttagaaaaagc

SEQ ID NO: 2949 - DNA, 89 bp, synthetic construct
  misc_feature 1..89: note = Description of Artificial Sequence: Synthetic oligonucleotide
  source 1..89: mol_type = other DNA
gggcagtgccagatgaacttcccattgggggacattcttatttttatcgagcacaaacaatgcaatggcagcctctgcttagaaaaagc

SEQ ID NO: 2950 - DNA, 49 bp, synthetic construct; identical to SEQ ID NO: 2948
  misc_feature 1..49: note = Description of Artificial Sequence: Synthetic oligonucleotide
  source 1..49: mol_type = other DNA

SEQ ID NO: 2951 - DNA, 89 bp, synthetic construct; identical to SEQ ID NO: 2949
  misc_feature 1..89: note = Description of Artificial Sequence: Synthetic oligonucleotide
  source 1..89: mol_type = other DNA

SEQ ID NO: 2952 - DNA, 49 bp, synthetic construct; identical to SEQ ID NO: 2948
  misc_feature 1..49: note = Description of Artificial Sequence: Synthetic oligonucleotide
  source 1..49: mol_type = other DNA

SEQ ID NO: 2953 - DNA, 48 bp, synthetic construct
  misc_feature 1..48: note = Description of Artificial Sequence: Synthetic oligonucleotide
  source 1..48: mol_type = other DNA
gggcagtgccagatgaacttccaatggcagcctctgcttagaaaaagc

SEQ ID NO: 2954 - DNA, 49 bp, synthetic construct; identical to SEQ ID NO: 2948
  misc_feature 1..49: note = Description of Artificial Sequence: Synthetic oligonucleotide
  source 1..49: mol_type = other DNA

SEQ ID NO: 2955 - DNA, 48 bp, synthetic construct; identical to SEQ ID NO: 2953
  misc_feature 1..48: note = Description of Artificial Sequence: Synthetic oligonucleotide
  source 1..48: mol_type = other DNA

SEQ ID NO: 2956 - DNA, 90 bp, synthetic construct
  misc_feature 1..90: note = Description of Artificial Sequence: Synthetic oligonucleotide
  source 1..90: mol_type = other DNA
gtctagtgcaagctaacagttgcttttatcacaggctccaggaagggtttggcctctgattagggtgggggcgtgggtggggtagaagag

SEQ ID NO: 2957 - DNA, 89 bp, synthetic construct
  misc_feature 1..89: note = Description of Artificial Sequence: Synthetic oligonucleotide
  source 1..89: mol_type = other DNA
gtctagtgcaagctaacagttgcttttatcacaggctccaggaagggtttggcctctgattaggtgggggcgtgggtggggtagaagag

SEQ ID NO: 2958 - DNA, 81 bp, synthetic construct
  misc_feature 1..81: note = Description of Artificial Sequence: Synthetic oligonucleotide
  source 1..81: mol_type = other DNA
gtctagtgcaagctaacagttgcttttatcacaggctccaggaagggtttggcctctgggggcgtgggtggggtagaagag

SEQ ID NO: 2959 - DNA, 71 bp, synthetic construct
  misc_feature 1..71: note = Description of Artificial Sequence: Synthetic oligonucleotide
  source 1..71: mol_type = other DNA
gtctagtgcaagctaacagttgcttttatcacaggctccaggaagggtttggcgtgggtggggtagaagag

SEQ ID NO: 2960 - DNA, 71 bp, synthetic construct; identical to SEQ ID NO: 2959
  misc_feature 1..71: note = Description of Artificial Sequence: Synthetic oligonucleotide
  source 1..71: mol_type = other DNA

SEQ ID NO: 2961 - DNA, 89 bp, synthetic construct; identical to SEQ ID NO: 2957
  misc_feature 1..89: note = Description of Artificial Sequence: Synthetic oligonucleotide
  source 1..89: mol_type = other DNA

SEQ ID NO: 2962 - DNA, 66 bp, synthetic construct
  misc_feature 1..66: note = Description of Artificial Sequence: Synthetic oligonucleotide
  source 1..66: mol_type = other DNA
gtctagtgcaagctaacagttgcttttatcacaggctccaggaagggcgtgggtggggtagaagag

SEQ ID NO: 2963 - DNA, 71 bp, synthetic construct; identical to SEQ ID NO: 2959
  misc_feature 1..71: note = Description of Artificial Sequence: Synthetic oligonucleotide
  source 1..71: mol_type = other DNA

SEQ ID NO: 2964 - DNA, 77 bp, synthetic construct
  misc_feature 1..77: note = Description of Artificial Sequence: Synthetic oligonucleotide
  source 1..77: mol_type = other DNA
gtctagtgcaagctaacagttgcttttatcacaggctccaggaagggtttggtgggggcgtgggtggggtagaagag

SEQ ID NO: 2965 - DNA, 74 bp, synthetic construct
  misc_feature 1..74: note = Description of Artificial Sequence: Synthetic oligonucleotide
  source 1..74: mol_type = other DNA
gtctagtgcaagctaacagttgcttttatcacaggctccaggaagggtttgggggcgtgggtggggtagaagag

SEQ ID NO: 2966 - DNA, 71 bp, synthetic construct; identical to SEQ ID NO: 2959
  misc_feature 1..71: note = Description of Artificial Sequence: Synthetic oligonucleotide
  source 1..71: mol_type = other DNA

SEQ ID NO: 2967 - DNA, 72 bp, synthetic construct
  misc_feature 1..72: note = Description of Artificial Sequence: Synthetic oligonucleotide
  source 1..72: mol_type = other DNA
gtctagtgcaagctaacagttgcttttatcacaggctccaggaagggtttgggcgtgggtggggtagaagag

SEQ ID NO: 2968 - DNA, 66 bp, synthetic construct
  misc_feature 1..66: note = Description of Artificial Sequence: Synthetic oligonucleotide
  source 1..66: mol_type = other DNA
gtctagtgcaagctaacagttgcttttatcacaggctccaggaagggtttgggtggggtagaagag

SEQ ID NO: 2969 - protein, 6 aa, synthetic construct
  REGION 1..6: note = Description of Artificial Sequence: Synthetic 6xHis tag
HHHHHH

SEQ ID NO: 2970 - protein, 8 aa, synthetic construct
  REGION 1..8: note = Description of Artificial Sequence: Synthetic 8xHis tag
HHHHHHHH

SEQ ID NO: 2971 - protein, 10 aa, synthetic construct
  REGION 1..10: note = Description of Artificial Sequence: Synthetic peptide
  VARIANT 1..10: note = MISC_FEATURE - This sequence may encompass 3-10 residues
HHHHHHHHHH

SEQ ID NO: 2972-6583 - skipped (3612 entries)

SEQ ID NO: 6584 - RNA, 12 nt, synthetic construct
  misc_feature 1..12: note = Description of Artificial Sequence: Synthetic oligonucleotide
  source 1..12: mol_type = other RNA
gttttagagcta

SEQ ID NO: 6585 - RNA, 12 nt, synthetic construct
  misc_feature 1..12: note = Description of Artificial Sequence: Synthetic oligonucleotide
  source 1..12: mol_type = other RNA
gtttaagagcta

SEQ ID NO: 6586-6588 - skipped (3 entries)

SEQ ID NO: 6589 - RNA, 60 nt, synthetic construct
  misc_feature 1..60: note = Description of Artificial Sequence: Synthetic oligonucleotide
  source 1..60: mol_type = other RNA
tagcaagttaaaataaggctagtccgttatcaacttgaaaaagtggcaccgagtcggtgc

SEQ ID NO: 6590 - RNA, 60 nt, synthetic construct
  misc_feature 1..60: note = Description of Artificial Sequence: Synthetic oligonucleotide
  source 1..60: mol_type = other RNA
tagcaagtttaaataaggctagtccgttatcaacttgaaaaagtggcaccgagtcggtgc

SEQ ID NO: 6591-6595 - skipped (5 entries)

SEQ ID NO: 6596 - DNA, 5000 bp, synthetic construct
  misc_feature 1..5000: note = Description of Artificial Sequence: Synthetic polynucleotide
  misc_difference 1..5000: note = misc_feature - This sequence may encompass 50-5000 nucleotides
  source 1..5000: mol_type = other DNA
aaaaaaaaaaaaaaaaaaaaaaaaaaaaaaaaaaaaaaaaaaaaaaaaaaaaaaaaaaaaaaaaaaaaaaaaaaaaaaaaaaaaaaaaaaaaaaaaaaaaaaaaaaaaaaaaaaaaaaaaaaaaaaaaaaaaaaaaaaaaaaaaaaaaaaaaaaaaaaaaaaaaaaaaaaaaaaaaaaaaaaaaaaaaaaaaaaaaaaaaaaaaaaaaaaaaaaaaaaaaaaaaaaaaaaaaaaaaaaaaaaaaaaaaaaaaaaaaaaaaaaaaaaaaaaaaaaaaaaaaaaaaaaaaaaaaaaaaaaaaaaaaaaaaaaaaaaaaaaaaaaaaaaaaaaaaaaaaaaaaaaaaaaaaaaaaaaaaaaaaaaaaaaaaaaaaaaaaaaaaaaaaaaaaaaaaaaaaaaaaaaaaaaaaaaaaaaaaaaaaaaaaaaaaaaaaaaaaaaaaaaaaaaaaaaaaaaaaaaaaaaaaaaaaaaaaaaaaaaaaaaaaaaaaaaaaaaaaaaaaaaaaaaaaaaaaaaaaaaaaaaaaaaaaaaaaaaaaaaaaaaaaaaaaaaaaaaaaaaaaaaaaaaaaaaaaaaaaaaaaaaaaaaaaaaaaaaaaaaaaaaaaaaaaaaaaaaaaaaaaaaaaaaaaaaaaaaaaaaaaaaaaaaaaaaaaaaaaaaaaaaaaaaaaaaaaaaaaaaaaaaaaaaaaaaaaaaaaaaaaaaaaaaaaaaaaaaaaaaaaaaaaaaaaaaaaaaaaaaaaaaaaaaaaaaaaaaaaaaaaaaaaaaaaaaaaaaaaaaaaaaaaaaaaaaaaaaaaaaaaaaaaaaaaaaaaaaaaaaaaaaaaaaaaaaaaaaaaaaaaaaaaaaaaaaaaaaaaaaaaaaaaaaaaaaaaaaaaaaaaaaaaaaaaaaaaaaaaaaaaaaaaaaaaaaaaaaaaaaaaaaaaaaaaaaaaaaaaaaaaaaaaaaaaaaaaaaaaaaaaaaaaaaaaaaaaaaaaaaaaaaaaaaaaaaaaaaaaaaaaaaaaaaaaaaaaaaaaaaaaaaaaaaaaaaaaaaaaaaaaaaaaaaaaaaaaaaaaaaaaaaaaaaaaaaaaaaaaaaaaaaaaaaaaaaaaaaaaaaaaaaaaaaaaaaaaaaaaaaaaaaaaaaaaaaaaaaaaaaaaaaaaaaaaaaaaaaaaaaaaaaaaaaaaaaaaaaaaaaaaaaaaaaaaaaaaaaaaaaaaaaaaaaaaaaaaaaaaaaaaaaaaaaaaaaaaaaaaaaaaaaaaaaaaaaaaaaaaaaaaaaaaaaaaaaaaaaaaaaaaaaaaaaaaaaaaaaaaaaaaaaaaaaaaaaaaaaaaaaaaaaaaaaaaaaaaaaaaaaaaaaaaaaaaaaaaaaaaaaaaaaaaaaaaaaaaaaaaaaaaaaaaaaaaaaaaaaaaaaaaaaaaaaaaaaaaaaaaaaaaaaaaaaaaaaaaaaaaaaaaaaaaaaaaaaaaaaaaaaaaaaaaaaaaaaaaaaaaaaaaaaaaaaaaaaaaaaaaaaaaaaaaaaaaaaaaaaaaaaaaaaaaaaaaaaaaaaaaaaaaaaaaaaaaaaaaaaaaaaaaaaaaaaaaaaaaaaaaaaaaaaaaaaaaaaaaaaaaaaaaaaaaaaaaaaaaaaaaaaaaaaaaaaaaaaaaaaaaaaaaaaaaaaaaaaaaaaaaaaaaaaaaaaaaaaaaaaaaaaaaaaaaaaaaaaaaaaaaaaaaaaaaaaaaaaaaaaaaaaaaaaaaaaaaaaaaaaaaaaaaaaaaaaaaaaaaaaaaaaaaaaaaaaaaaaaaaaaaaaaaaaaaaaaaaaaaaaaaaaaaaaaaaaaaaaaaaaaaaaaaaaaaaaaaaaaaaaaaaaaaaaaaaaaaaaaaaaaaaaaaaaaaaaaaaaaaaaaaaaaaaaaaaaaaaaaaaaaaaaaaaaaaaaaaaaaaaaaaaaaaaaaaaaaaaaaaaaaaaaaaaaaaaaaaaaaaaaaaaaaaaaaaaaaaaaaaaaaaaaaaaaaaaaaaaaaaaaaaaaaaaaaaaaaaaaaaaaaaaaaaaaaaaaaaaaaaaaaaaaaaaaaaaaaaaaaaaaaaaaaaaaaaaaaaaaaaaaaaaaaaaaaaaaaaaaaaaaaaaaaaaaaaaaaaaaaaaaaaaaaaaaaaaaaaaaaaaaaaaaaaaaaaaaaaaaaaaaaaaaaaaaaaaaaaaaaaaaaaaaaaaaaaaaaaaaaaaaaaaaaaaaaaaaaaaaaaaaaaaaaaaaaaaaaaaaaaaaaaaaaaaaaaaaaaaaaaaaaaaaaaaaaaaaaaaaaaaaaaaaaaaaaaaaaaaaaaaaaaaaaaaaaaaaaaaaaaaaaaaaaaaaaaaaaaaaaaaaaaaaaaaaaaaaaaaaaaaaaaaaaaaaaaaaaaaaaaaaaaaaaaaaaaaaaaaaaaaaaaaaaaaaaaaaaaaaaaaaaaaaaaaaaaaaaaaaaaaaaaaaaaaaaaaaaaaaaaaaaaaaaaaaaaaaaaaaaaaaaaaaaaaaaaaaaaaaaaaaaaaaaaaaaaaaaaaaaaaaaaaaaaaaaaaaaaaaaaaaaaaaaaaaaaaaaaaaaaaaaaaaaaaaaaaaaaaaaaaaaaaaaaaaaaaaaaaaaaaaaaaaaaaaaaaaaaaaaaaaaaaaaaaaaaaaaaaaaaaaaaaaaaaaaaaaaaaaaaaaaaaaaaaaaaaaaaaaaaaaaaaaaaaaaaaaaaaaaaaaaaaaaaaaaaaaaaaaaaaaaaaaaaaaaaaaaaaaaaaaaaaaaaaaaaaaaaaaaaaaaaaaaaaaaaaaaaaaaaaaaaaaaaaaaaaaaaaaaaaaaaaaaaaaaaaaaaaaaaaaaaaaaaaaaaaaaaaaaaaaaaaaaaaaaaaaaaaaaaaaaaaaaaaaaaaaaaaaaaaaaaaaaaaaaaaaaaaaaaaaaaaaaaaaaaaaaaaaaaaaaaaaaaaaaaaaaaaaaaaaaaaaaaaaaaaaaaaaaaaaaaaaaaaaaaaaaaaaaaaaaaaaaaaaaaaaaaaaaaaaaaaaaaaaaaaaaaaaaaaaaaaaaaaaaaaaaaaaaaaaaaaaaaaaaaaaaaaaaaaaaaaaaaaaaaaaaaaaaaaaaaaaaaaaaaaaaaaaaaaaaaaaaaaaaaaaaaaaaaaaaaaaaaaaaaaaaaaaaaaaaaaaaaaaaaaaaaaaaaaaaaaaaaaaaaaaaaaaaaaaaaaaaaaaaaaaaaaaaaaaaaaaaaaaaaaaaaaaaaaaaaaaaaaaaaaaaaaaaaaaaaaaaaaaaaaaaaaaaaaaaaaaaaaaaaaaaaaaaaaaaaaaaaaaaaaaaaaaaaaaaaaaaaaaaaaaaaaaaaaaaaaaaaaaaaaaaaaaaaaaaaaaaaaaaaaaaaaaaaaaaaaaaaaaaaaaaaaaaaaaaaaaaaaaaaaaaaaaaaaaaaaaaaaaaaaaaaaaaaaaaaaaaaaaaaaaaaaaaaaaaaaaaaaaaaaaaaaaaaaaaaaaaaaaaaaaaaaaaaaaaaaaaaaaaaaaaaaaaaaaaaaaaaaaaaaaaaaaaaaaaaaaaaaaaaaaaaaaaaaaaaaaaaaaaaaaaaaaaaaaaaaaaaaaaaaaaaaaaaaaaaaaaaaaaaaaaaaaaaaaaaaaaaaaaaaaaaaaaaaaaaaaaaaaaaaaaaaaaaaaaaaaaaaaaaaaaaaaaaaaaaaaaaaaaaaaaaaaaaaaaaaaaaaaaaaaaaaaaaaaaaaaaaaaaaaaaaaaaaaaaaaaaaaaaaaaaaaaaaaaaaaaaaaaaaaaaaaaaaaaaaaaaaaaaaaaaaaaaaaaaaaaaaaaaaaaaaaaaaaaaaaaaaaaaaaaaaaaaaaaaaaaaaaaaaaaaaaaaaaaaaaaaaaaaaaaaaaaaaaaaaaaaaaaaaaaaaaaaaaaaaaaaaaaaaaaaaaaaaaaaaaaaaaaaaaaaaaaaaaaaaaaaaaaaaaaaaaaaaaaaaaaaaaaaaaaaaaaaaaaaaaaaaaaaaaaaaaaaaaaaaaaaaaaaaaaaaaaaaaaaaaaaaaaaaaaaaaaaaaaaaaaaaaaaaaaaaaaaaaaaaaaaaaaaaaaaaaaaaaaaaaaaaaaaaaaaaaaaaaaaaaaaaaaaaaaaaaaaaaaaaaaaaaaaaaaaaaaaaaaaaaaaaaaaaaaaaaaaaaaaaaaaaaaaaaaaaaaaaaaaaaaaaaaaaaaaaaaaaaaaaaaaaaaaaaaaaaaaaaaaaaaaaaaaaaaaaaaaaaaaaaaaaaaaaaaaaaaaaaaaaaaaaaaaaaaaaaaaaaaaaaaaaaaaaaaaaaaaaaaaaaaaaaaaaaaaaaaaaaaaaaaaaaaaaaaaaaaaaaaaaaaaaaaaaaaaaaaaaaaaaaaaaaaaaaaaaaaaaaaaaaaaaaaaaaaaaaaaaaaaaaaaaaaaaaaaaaaaaaaaaaaaaaaaaaaaaaaaaaaaaaaaaaaaaaaaaaaaaaaaaaaaaaaaaaaaaaaaaaaaaaaaaaaaaaaaaaaaaaaaaaaaaaaaaaaaaaaaaaaaaaaaaaaaaaaaaaaaaaaaaaaaaaaaaaaaaaaaaaaaaaaaaaaaaaaaaaaaaaaaaaaaaaaaaaaaaaaaaaaaaaaaaaaaaaaaaaaaaaaaaaaaaaaaaaaaaaaaaaaaaaaaaaaaaaaaaaaaaaaaaaaaaaaaaaaaaaaaaaaaaaaaaaaaaaaaaaaaaaaaaaaaaaaaaaaaaaaaaaaaaaaaaaaaaaaaaaaaaaaaaaaaaaaaaaaaaaaaaaaaaaaaaaaaaaaaaaaaaaaaaaaaaaaaaaaaaaaaaaaaaaaaaaaaaaaaaaaaaaaaaaaaaaaaaaaaaaaaaaaaaaaaaaaaaaaaaaaaaaaaaaaaaaaaaaaaaaaaaaaaaaaaaaaaaaaaaaaaaaaaaaaaaaaaaaaaaaaaaaaaaaaaaaaaaaaaaaaaaaaaaaaaaaaaaaaaaaaaaaaaaaaaaaaaaaaaaaaaaaaaaaaaaaaaaaaaaaaaaaaaaaaaaaaaaaaaaaaaaaaaaaaaa

SEQ ID NO: 6597 - RNA, 13 nt, synthetic construct
  misc_feature 1..13: note = Description of Artificial Sequence: Synthetic oligonucleotide
  source 1..13: mol_type = other RNA
tagcaagttaaaa

SEQ ID NO: 6598 - RNA, 13 nt, synthetic construct
  misc_feature 1..13: note = Description of Artificial Sequence: Synthetic oligonucleotide
  source 1..13: mol_type = other RNA
tagcaagtttaaa

SEQ ID NO: 6599 - RNA, 47 nt, synthetic construct
  misc_feature 1..47: note = Description of Artificial Sequence: Synthetic oligonucleotide
  source 1..47: mol_type = other RNA
taaggctagtccgttatcaacttgaaaaagtggcaccgagtcggtgc

SEQ ID NO: 6600 - RNA, 51 nt, synthetic construct
  misc_feature 1..51: note = Description of Artificial Sequence: Synthetic oligonucleotide
  source 1..51: mol_type = other RNA
taaggctagtccgttatcaacttgaaaaagtggcaccgagtcggtgctttt

SEQ ID NO: 6601 - RNA, 76 nt, synthetic construct
  misc_feature 1..76: note = Description of Artificial Sequence: Synthetic oligonucleotide
  source 1..76: mol_type = other RNA
gttttagagctagaaatagcaagttaaaataaggctagtccgttatcaacttgaaaaagtggcaccgagtcggtgc

SEQ ID NO: 6602 - RNA, 76 nt, synthetic construct
  misc_feature 1..76: note = Description of Artificial Sequence: Synthetic oligonucleotide
  source 1..76: mol_type = other RNA
gtttaagagctagaaatagcaagtttaaataaggctagtccgttatcaacttgaaaaagtggcaccgagtcggtgc

SEQ ID NO: 6603 - RNA, 86 nt, synthetic construct
  misc_feature 1..86: note = Description of Artificial Sequence: Synthetic oligonucleotide
  source 1..86: mol_type = other RNA
gttttagagctatgctggaaacagcatagcaagttaaaataaggctagtccgttatcaacttgaaaaagtggcaccgagtcggtgc

SEQ ID NO: 6604 - RNA, 86 nt, synthetic construct
  misc_feature 1..86: note = Description of Artificial Sequence: Synthetic oligonucleotide
  source 1..86: mol_type = other RNA
gtttaagagctatgctggaaacagcatagcaagtttaaataaggctagtccgttatcaacttgaaaaagtggcaccgagtcggtgc

SEQ ID NO: 6605 - RNA, 17 nt, synthetic construct
  misc_feature 1..17: note = Description of Artificial Sequence: Synthetic oligonucleotide
  source 1..17: mol_type = other RNA
gttttagagctatgctg

SEQ ID NO: 6606 - RNA, 17 nt, synthetic construct
  misc_feature 1..17: note = Description of Artificial Sequence: Synthetic oligonucleotide
  source 1..17: mol_type = other RNA
gtttaagagctatgctg

SEQ ID NO: 6607 - RNA, 22 nt, synthetic construct
  misc_feature 1..22: note = Description of Artificial Sequence: Synthetic oligonucleotide
  source 1..22: mol_type = other RNA
gttttagagctatgctgttttg

SEQ ID NO: 6608 - RNA, 22 nt, synthetic construct
  misc_feature 1..22: note = Description of Artificial Sequence: Synthetic oligonucleotide
  source 1..22: mol_type = other RNA
gtttaagagctatgctgttttg

SEQ ID NO: 6609 - RNA, 65 nt, synthetic construct
  misc_feature 1..65: note = Description of Artificial Sequence: Synthetic oligonucleotide
  source 1..65: mol_type = other RNA
cagcatagcaagttaaaataaggctagtccgttatcaacttgaaaaagtggcaccgagtcggtgc

SEQ ID NO: 6610 - RNA, 65 nt, synthetic construct
  misc_feature 1..65: note = Description of Artificial Sequence: Synthetic oligonucleotide
  source 1..65: mol_type = other RNA
cagcatagcaagtttaaataaggctagtccgttatcaacttgaaaaagtggcaccgagtcggtgc

SEQ ID NO: 6611 - protein, 1368 aa, Streptococcus pyogenes [sequence omitted]

SEQ ID NO: 6612 - protein, 7 aa, Simian virus 40
PKKKRKV

SEQ ID NO: 6613 - protein, 16 aa, unidentified
  REGION 1..16: note = Description of Unknown: Nucleoplasmin bipartite NLS sequence
KRPAATKKAGQAKKKK

SEQ ID NO: 6614 - protein, 9 aa, unidentified
  REGION 1..9: note = Description of Unknown: C-myc NLS sequence
PAAKRVKLD

SEQ ID NO: 6615 - protein, 11 aa, unidentified
  REGION 1..11: note = Description of Unknown: C-myc NLS sequence
RQRRNELKRSP

SEQ ID NO: 6616 - protein, 38 aa, Homo sapiens
NQSSNFGPMKGGNFGGRSSGPYGGGGQYFAKPRNQGGY

SEQ ID NO: 6617 - protein, 42 aa, unidentified
  REGION 1..42: note = Description of Unknown: IBB domain from importin-alpha sequence
RMRIZFKNKGKDTAELRRRRVEVSVELRKAKKDEQILKRRNV

SEQ ID NO: 6618 - protein, 8 aa, unidentified
  REGION 1..8: note = Description of Unknown: Myoma T protein sequence
VSRKRPRP

SEQ ID NO: 6619 - protein, 8 aa, unidentified
  REGION 1..8: note = Description of Unknown: Myoma T protein sequence
PPKKARED

SEQ ID NO: 6620 - protein, 8 aa, Homo sapiens
PQPKKKPL

SEQ ID NO: 6621 - protein, 12 aa, Mus musculus
SALIKKKKKMAP

SEQ ID NO: 6622 - protein, 5 aa, Influenza virus
DRLRR

SEQ ID NO: 6623 - protein, 7 aa, Influenza virus
PKQKKRK

SEQ ID NO: 6624 - protein, 10 aa, Hepatitis delta virus
RKLKKKIKKL

SEQ ID NO: 6625 - protein, 10 aa, Mus musculus
REKKKFLKRR

SEQ ID NO: 6626 - protein, 20 aa, Homo sapiens
KRKGDEVDGVDEVAKKKSKK

SEQ ID NO: 6627 - protein, 17 aa, Homo sapiens
RKCLQAGMNLEARKTKK

SEQ ID NO: 6628 - DNA, 4107 bp, synthetic construct
  misc_feature 1..4107: note = Description of Artificial Sequence: Synthetic polynucleotide
  source 1..4107: mol_type = other DNA
atggataaaaagtacagcatcgggctggacatcggtacaaactcagtggggtgggccgtgattacggacgagtacaaggtaccctccaaaaaatttaaagtgctgggtaacacggacagacactctataaagaaaaatcttattggagccttgctgttcgactcaggcgagacagccgaagccacaaggttgaagcggaccgccaggaggcggtataccaggagaaagaaccgcatatgctacctgcaagaaatcttcagtaacgagatggcaaaggttgacgatagctttttccatcgcctggaagaatcctttcttgttgaggaagacaagaagcacgaacggcaccccatctttggcaatattgtcgacgaagtggcatatcacgaaaagtacccgactatctaccacctcaggaagaagctggtggactctaccgataaggcggacctcagacttatttatttggcactcgcccacatgattaaatttagaggacatttcttgatcgagggcgacctgaacccggacaacagtgacgtcgataagctgttcatccaacttgtgcagacctacaatcaactgttcgaagaaaaccctataaatgcttcaggagtcgacgctaaagcaatcctgtccgcgcgcctctcaaaatctagaagacttgagaatctgattgctcagttgcccggggaaaagaaaaatggattgtttggcaacctgatcgccctcagtctcggactgaccccaaatttcaaaagtaacttcgacctggccgaagacgctaagctccagctgtccaaggacacatacgatgacgacctcgacaatctgctggcccagattggggatcagtacgccgatctctttttggcagcaaagaacctgtccgacgccatcctgttgagcgatatcttgagagtgaacaccgaaattactaaagcaccccttagcgcatctatgatcaagcggtacgacgagcatcatcaggatctgaccctgctgaaggctcttgtgaggcaacagctccccgaaaaatacaaggaaatcttctttgaccagagcaaaaacggctacgctggctatatagatggtggggccagtcaggaggaattctataaattcatcaagcccattctcgagaaaatggacggcacagaggagttgctggtcaaacttaacagggaggacctgctgcggaagcagcggacctttgacaacgggtctatcccccaccagattcatctgggcgaactgcacgcaatcctgaggaggcaggaggatttttatccttttcttaaagataaccgcgagaaaatagaaaagattcttacattcaggatcccgtactacgtgggacctctcgcccggggcaattcacggtttgcctggatgacaaggaagtcagaggagactattacaccttggaacttcgaagaagtggtggacaagggtgcatctgcccagtctttcatcgagcggatgacaaattttgacaagaacctccctaatgagaaggtgctgcccaaacattctctgctctacgagtactttaccgtctacaatgaactgactaaagtcaagtacgtcaccgagggaatgaggaagccggcattccttagtggagaacagaagaaggcgattgtagacctgttgttcaagaccaacaggaaggtgactgtgaagcaacttaaagaagactactttaagaagatcgaatgttttgacagtgtggaaatttcaggggttgaagaccgcttcaatgcgtcattggggacttaccatgatcttctcaagatcataaaggacaaagacttcctggacaacgaagaaaatgaggatattctcgaagacatcgtcctcaccctgaccctgttcgaagacagggaaatgatagaagagcgcttgaaaacctatgcccacctcttcgacgataaagttatgaagcagctgaagcgcaggagatacacaggatggggaagattgtcaaggaagctgatcaatggaattagggataaacagagtggcaagaccatactggatttcctcaaatctgatggcttcgccaataggaacttcatgcaactgattcacgatgactctcttaccttcaaggaggacattcaaaaggctcaggtgagcgggcagggagactcccttcatgaacacatcgcgaatttggcaggttcccccgctattaaaaagggcatccttcaaactgtcaaggtggtggatgaattggtcaaggtaatgggcagacataagccagaaaatattgtgatcgagatggcccgcgaaaaccagaccacacagaagggccagaaaaatagtagagagcggatgaagaggatcgaggagggcatcaaagagctgggatctcagattctcaaagaacaccccgtagaaaacacacagctgcagaacgaaaaattgtacttgtactatctgcagaacggcagagacatgtacgtcgaccaagaacttgatattaatagactgtccgactatgacgtagaccatatcgtgccccagtccttcctgaaggacgactccattgataacaaagtcttgacaagaagcgacaagaacaggggtaaaagtgataatgtgcctagcgaggaggtggtgaaaaaaatgaagaactactggcgacagctgcttaatgcaaagctcattacacaacggaagttcgataatctgacgaaagcagagagaggtggcttgtctgagttggacaaggcagggtttattaagcggcagctggtggaaactaggcagatcacaaagcacgtggcgcagattttggacagccggatgaacacaaaatacgacgaaaatgataaactgatacgagaggtcaaagttatcacgctgaaaagcaagctggtgtccgattttcggaaagacttccagttctacaaagttcgcgagattaataactaccatcatgctcacgatgcgtacctgaacgctgttgtcgggaccgccttgataaagaagtacccaaagctggaatccgagttcgtatacggggattacaaagtgtacgatgtgaggaaaatgatagccaagtccgagcaggagattggaaaggccacagctaagtacttcttttattctaacatcatgaatttttttaagacggaaattaccctggccaacggagagatcagaaagcggccccttatagagacaaatggtgaaacaggtgaaatcgtctgggataagggcagggatttcgctactgtgaggaaggtgctgagtatgccacaggtaaatatcgtgaaaaaaaccgaagtacagaccggaggattttccaaggaaagcattttgcctaaaagaaactcagacaagctcatcgcccgcaagaaagattgggaccctaagaaatacgggggatttgactcacccaccgtagcctattctgtgctggtggtagctaaggtggaaaaaggaaagtctaagaagctgaagtccgtgaaggaactcttgggaatcactatcatggaaagatcatcctttgaaaagaaccctatcgatttcctggaggctaagggttacaaggaggtcaagaaagacctcatcattaaactgccaaaatactctctcttcgagctggaaaatggcaggaagagaatgttggccagcgccggagagctgcaaaagggaaacgagcttgctctgccctccaaatatgttaattttctctatctcgcttcccactatgaaaagctgaaagggtctcccgaagataacgagcagaagcagctgttcgtcgaacagcacaagcactatctggatgaaataatcgaacaaataagcgagttcagcaaaagggttatcctggcggatgctaatttggacaaagtactgtctgcttataacaagcaccgggataagcctattagggaacaagccgagaatataattcacctctttacactcacgaatctcggagcccccgccgccttcaaatactttgatacgactatcgaccggaaacggtataccagtaccaaagaggtcctcgatgccaccctcatccaccagtcaattactggcctgtacgaaacacggatcgacctctctcaactgggcggcgactag

SEQ ID NO: 6629-6659 - skipped (31 entries)

SEQ ID NO: 6660 - RNA, 74 nt, synthetic construct; identical to SEQ ID NO: 346
  misc_feature 1..74: note = Description of Artificial Sequence: Synthetic oligonucleotide
  source 1..74: mol_type = other RNA

SEQ ID NO: 6661 - RNA, 74 nt, synthetic construct
  misc_feature 1..74: note = Description of Artificial Sequence: Synthetic oligonucleotide
  source 1..74: mol_type = other RNA
aacagcatagcaagtttaaataaggctagtccgttatcaacttgaaaaagtggcaccgagtcggtgcttttttt

SEQ ID NO: 6662-7805 - skipped (1144 entries)

SEQ ID NO: 7806 - RNA, 16 nt, synthetic construct
  misc_feature 1..16: note = Description of Artificial Sequence: Synthetic oligonucleotide
  source 1..16: mol_type = other RNA
gttttagagctatgct

SEQ ID NO: 7807 - RNA, 90 nt, synthetic construct
  misc_feature 1..90: note = Description of Artificial Sequence: Synthetic oligonucleotide
  source 1..90: mol_type = other RNA
gtttaagagctatgctggaaacagcatagcaagtttaaataaggctagtccgttatcaacttgaaaaagtggcaccgagtcggtgctttt

SEQ ID NO: 7808 - RNA, 67 nt, synthetic construct
  misc_feature 1..67: note = Description of Artificial Sequence: Synthetic oligonucleotide
  source 1..67: mol_type = other RNA
agcatagcaagttaaaataaggctagtccgttatcaacttgaaaaagtggcaccgagtcggtgcttt

SEQ ID NO: 7809 - RNA, 85 nt, synthetic construct
  misc_feature 1..85: note = Description of Artificial Sequence: Synthetic oligonucleotide
  source 1..85: mol_type = other RNA
gttggaaccattcaaaacagcatagcaagttaaaataaggctagtccgttatcaacttgaaaaagtggcaccgagtcggtgcttt

SEQ ID NO: 7810 - protein, 7 aa, Tobacco etch virus
ENLYFQG

SEQ ID NO: 7811 - RNA, 80 nt, synthetic construct
  misc_feature 1..80: note = Description of Artificial Sequence: Synthetic oligonucleotide
  source 1..80: mol_type = other RNA
gttttagagctagaaatagcaagttaaaataaggctagtccgttatcaacttgaaaaagtggcaccgagtcggtgctttt

SEQ ID NO: 7812 - RNA, 67 nt, synthetic construct
  misc_feature 1..67: note = Description of Artificial Sequence: Synthetic oligonucleotide
  source 1..67: mol_type = other RNA
aacagcatagcaagttaaaataaggctagtccgttatcaacttgaaaaagtggcaccgagtcggtgc

SEQ ID NO: 7813-7820 - skipped (8 entries)

SEQ ID NO: 7821 - protein, 1393 aa, synthetic construct
  REGION 1..1393: note = Description of Artificial Sequence: Synthetic polypeptide
MAPKKKRKVDKKYSIGLDIGTNSVGWAVITDEYKVPSKKFKVLGNTDRHSIKKNLIGALLFDSGETAEATRLKRTARRRYTRRKNRICYLQEIFSNEMAKVDDSFFHRLEESFLVEEDKKHERHPIFGNIVDEVAYHEKYPTIYHLRKKLVDSTDKADLRLIYLALAHMIKFRGHFLIEGDLNPDNSDVDKLFIQLVQTYNQLFEENPINASGVDAKAILSARLSKSRRLENLIAQLPGEKKNGLFGNLIALSLGLTPNFKSNFDLAEDAKLQLSKDTYDDDLDNLLAQIGDQYADLFLAAKNLSDAILLSDILRVNTEITKAPLSASMIKRYDEHHQDLTLLKALVRQQLPEKYKEIFFDQSKNGYAGYIDGGASQEEFYKFIKPILEKMDGTEELLVKLNREDLLRKQRTFDNGSIPHQIHLGELHAILRRQEDFYPFLKDNREKIEKILTFRIPYYVGPLARGNSRFAWMTRKSEETITPWNFEEVVDKGASAQSFIERMTNFDKNLPNEKVLPKHSLLYEYFTVYNELTKVKYVTEGMRKPAFLSGEQKKAIVDLLFKTNRKVTVKQLKEDYFKKIECFDSVEISGVEDRFNASLGTYHDLLKIIKDKDFLDNEENEDILEDIVLTLTLFEDREMIEERLKTYAHLFDDKVMKQLKRRRYTGWGRLSRKLINGIRDKQSGKTILDFLKSDGFANRNFMQLIHDDSLTFKEDIQKAQVSGQGDSLHEHIANLAGSPAIKKGILQTVKVVDELVKVMGRHKPENIVIEMARENQTTQKGQKNSRERMKRIEEGIKELGSQILKEHPVENTQLQNEKLYLYYLQNGRDMYVDQELDINRLSDYDVDHIVPQSFLKDDSIDNKVLTRSDKNRGKSDNVPSEEVVKKMKNYWRQLLNAKLITQRKFDNLTKAERGGLSELDKAGFIKRQLVETRQITKHVAQILDSRMNTKYDENDKLIREVKVITLKSKLVSDFRKDFQFYKVREINNYHHAHDAYLNAVVGTALIKKYPKLESEFVYGDYKVYDVRKMIAKSEQEIGKATAKYFFYSNIMNFFKTEITLANGEIRKRPLIETNGETGEIVWDKGRDFATVRKVLSMPQVNIVKKTEVQTGGFSKESILPKRNSDKLIARKKDWDPKKYGGFDSPTVAYSVLVVAKVEKGKSKKLKSVKELLGITIMERSSFEKNPIDFLEAKGYKEVKKDLIIKLPKYSLFELENGRKRMLASAGELQKGNELALPSKYVNFLYLASHYEKLKGSPEDNEQKQLFVEQHKHYLDEIIEQISEFSKRVILADANLDKVLSAYNKHRDKPIREQAENIIHLFTLTNLGAPAAFKYFDTTIDRKRYTSTKEVLDATLIHQSITGLYETRIDLSQLGGDSRADPKKKRKVHHHHHH

SEQ ID NO: 7822 - protein, 1393 aa, synthetic construct
  REGION 1..1393: note = Description of Artificial Sequence: Synthetic polypeptide
MAPKKKRKVDKKYSIGLDIGTNSVGWAVITDEYKVPSKKFKVLGNTDRHSIKKNLIGALLFDSGETAEATRLKRTARRRYTRRKNRILYLQEIFSNEMAKVDDSFFHRLEESFLVEEDKKHERHPIFGNIVDEVAYHEKYPTIYHLRKKLVDSTDKADLRLIYLALAHMIKFRGHFLIEGDLNPDNSDVDKLFIQLVQTYNQLFEENPINASGVDAKAILSARLSKSRRLENLIAQLPGEKKNGLFGNLIALSLGLTPNFKSNFDLAEDAKLQLSKDTYDDDLDNLLAQIGDQYADLFLAAKNLSDAILLSDILRVNTEITKAPLSASMIKRYDEHHQDLTLLKALVRQQLPEKYKEIFFDQSKNGYAGYIDGGASQEEFYKFIKPILEKMDGTEELLVKLNREDLLRKQRTFDNGSIPHQIHLGELHAILRRQEDFYPFLKDNREKIEKILTFRIPYYVGPLARGNSRFAWMTRKSEETITPWNFEEVVDKGASAQSFIERMTNFDKNLPNEKVLPKHSLLYEYFTVYNELTKVKYVTEGMRKPAFLSGEQKKAIVDLLFKTNRKVTVKQLKEDYFKKIEEFDSVEISGVEDRFNASLGTYHDLLKIIKDKDFLDNEENEDILEDIVLTLTLFEDREMIEERLKTYAHLFDDKVMKQLKRRRYTGWGRLSRKLINGIRDKQSGKTILDFLKSDGFANRNFMQLIHDDSLTFKEDIQKAQVSGQGDSLHEHIANLAGSPAIKKGILQTVKVVDELVKVMGRHKPENIVIEMARENQTTQKGQKNSRERMKRIEEGIKELGSQILKEHPVENTQLQNEKLYLYYLQNGRDMYVDQELDINRLSDYDVDHIVPQSFLKDDSIDNKVLTRSDKNRGKSDNVPSEEVVKKMKNYWRQLLNAKLITQRKFDNLTKAERGGLSELDKAGFIKRQLVETRQITKHVAQILDSRMNTKYDENDKLIREVKVITLKSKLVSDFRKDFQFYKVREINNYHHAHDAYLNAVVGTALIKKYPKLESEFVYGDYKVYDVRKMIAKSEQEIGKATAKYFFYSNIMNFFKTEITLANGEIRKRPLIETNGETGEIVWDKGRDFATVRKVLSMPQVNIVKKTEVQTGGFSKESILPKRNSDKLIARKKDWDPKKYGGFDSPTVAYSVLVVAKVEKGKSKKLKSVKELLGITIMERSSFEKNPIDFLEAKGYKEVKKDLIIKLPKYSLFELENGRKRMLASAGELQKGNELALPSKYVNFLYLASHYEKLKGSPEDNEQKQLFVEQHKHYLDEIIEQISEFSKRVILADANLDKVLSAYNKHRDKPIREQAENIIHLFTLTNLGAPAAFKYFDTTIDRKRYTSTKEVLDATLIHQSITGLYETRIDLSQLGGDSRADPKKKRKVHHHHHH

SEQ ID NO: 7823 - protein, 1399 aa, synthetic construct
  REGION 1..1399: note = Description of Artificial Sequence: Synthetic polypeptide
MGSSHHHHHHHHENLYFQGSMDKKYSIGLDIGTNSVGWAVITDEYKVPSKKFKVLGNTDRHSIKKNLIGALLFDSGETAEATRLKRTARRRYTRRKNRICYLQEIFSNEMAKVDDSFFHRLEESFLVEEDKKHERHPIFGNIVDEVAYHEKYPTIYHLRKKLVDSTDKADLRLIYLALAHMIKFRGHFLIEGDLNPDNSDVDKLFIQLVQTYNQLFEENPINASGVDAKAILSARLSKSRRLENLIAQLPGEKKNGLFGNLIALSLGLTPNFKSNFDLAEDAKLQLSKDTYDDDLDNLLAQIGDQYADLFLAAKNLSDAILLSDILRVNTEITKAPLSASMIKRYDEHHQDLTLLKALVRQQLPEKYKEIFFDQSKNGYAGYIDGGASQEEFYKFIKPILEKMDGTEELLVKLNREDLLRKQRTFDNGSIPHQIHLGELHAILRRQEDFYPFLKDNREKIEKILTFRIPYYVGPLARGNSRFAWMTRKSEETITPWNFEEVVDKGASAQSFIERMTNFDKNLPNEKVLPKHSLLYEYFTVYNELTKVKYVTEGMRKPAFLSGEQKKAIVDLLFKTNRKVTVKQLKEDYFKKIECFDSVEISGVEDRFNASLGTYHDLLKIIKDKDFLDNEENEDILEDIVLTLTLFEDREMIEERLKTYAHLFDDKVMKQLKRRRYTGWGRLSRKLINGIRDKQSGKTILDFLKSDGFANRNFMQLIHDDSLTFKEDIQKAQVSGQGDSLHEHIANLAGSPAIKKGILQTVKVVDELVKVMGRHKPENIVIEMARENQTTQKGQKNSRERMKRIEEGIKELGSQILKEHPVENTQLQNEKLYLYYLQNGRDMYVDQELDINRLSDYDVDHIVPQSFLKDDSIDNKVLTRSDKNRGKSDNVPSEEVVKKMKNYWRQLLNAKLITQRKFDNLTKAERGGLSELDKAGFIKRQLVETRQITKHVAQILDSRMNTKYDENDKLIREVKVITLKSKLVSDFRKDFQFYKVREINNYHHAHDAYLNAVVGTALIKKYPKLESEFVYGDYKVYDVRKMIAKSEQEIGKATAKYFFYSNIMNFFKTEITLANGEIRKRPLIETNGETGEIVWDKGRDFATVRKVLSMPQVNIVKKTEVQTGGFSKESILPKRNSDKLIARKKDWDPKKYGGFDSPTVAYSVLVVAKVEKGKSKKLKSVKELLGITIMERSSFEKNPIDFLEAKGYKEVKKDLIIKLPKYSLFELENGRKRMLASAGELQKGNELALPSKYVNFLYLASHYEKLKGSPEDNEQKQLFVEQHKHYLDEIIEQISEFSKRVILADANLDKVLSAYNKHRDKPIREQAENIIHLFTLTNLGAPAAFKYFDTTIDRKRYTSTKEVLDATLIHQSITGLYETRIDLSQLGGDGGGSPKKKRKV

SEQ ID NO: 7824 - protein, 1396 aa, synthetic construct
  REGION 1..1396: note = Description of Artificial Sequence: Synthetic polypeptide
MAHHHHHHGGSPKKKRKVDKKYSIGLDIGTNSVGWAVITDEYKVPSKKFKVLGNTDRHSIKKNLIGALLFDSGETAEATRLKRTARRRYTRRKNRICYLQEIFSNEMAKVDDSFFHRLEESFLVEEDKKHERHPIFGNIVDEVAYHEKYPTIYHLRKKLVDSTDKADLRLIYLALAHMIKFRGHFLIEGDLNPDNSDVDKLFIQLVQTYNQLFEENPINASGVDAKAILSARLSKSRRLENLIAQLPGEKKNGLFGNLIALSLGLTPNFKSNFDLAEDAKLQLSKDTYDDDLDNLLAQIGDQYADLFLAAKNLSDAILLSDILRVNTEITKAPLSASMIKRYDEHHQDLTLLKALVRQQLPEKYKEIFFDQSKNGYAGYIDGGASQEEFYKFIKPILEKMDGTEELLVKLNREDLLRKQRTFDNGSIPHQIHLGELHAILRRQEDFYPFLKDNREKIEKILTFRIPYYVGPLARGNSRFAWMTRKSEETITPWNFEEVVDKGASAQSFIERMTNFDKNLPNEKVLPKHSLLYEYFTVYNELTKVKYVTEGMRKPAFLSGEQKKAIVDLLFKTNRKVTVKQLKEDYFKKIECFDSVEISGVEDRFNASLGTYHDLLKIIKDKDFLDNEENEDILEDIVLTLTLFEDREMIEERLKTYAHLFDDKVMKQLKRRRYTGWGRLSRKLINGIRDKQSGKTILDFLKSDGFANRNFMQLIHDDSLTFKEDIQKAQVSGQGDSLHEHIANLAGSPAIKKGILQTVKVVDELVKVMGRHKPENIVIEMARENQTTQKGQKNSRERMKRIEEGIKELGSQILKEHPVENTQLQNEKLYLYYLQNGRDMYVDQELDINRLSDYDVDHIVPQSFLKDDSIDNKVLTRSDKNRGKSDNVPSEEVVKKMKNYWRQLLNAKLITQRKFDNLTKAERGGLSELDKAGFIKRQLVETRQITKHVAQILDSRMNTKYDENDKLIREVKVITLKSKLVSDFRKDFQFYKVREINNYHHAHDAYLNAVVGTALIKKYPKLESEFVYGDYKVYDVRKMIAKSEQEIGKATAKYFFYSNIMNFFKTEITLANGEIRKRPLIETNGETGEIVWDKGRDFATVRKVLSMPQVNIVKKTEVQTGGFSKESILPKRNSDKLIARKKDWDPKKYGGFDSPTVAYSVLVVAKVEKGKSKKLKSVKELLGITIMERSSFEKNPIDFLEAKGYKEVKKDLIIKLPKYSLFELENGRKRMLASAGELQKGNELALPSKYVNFLYLASHYEKLKGSPEDNEQKQLFVEQHKHYLDEIIEQISEFSKRVILADANLDKVLSAYNKHRDKPIREQAENIIHLFTLTNLGAPAAFKYFDTTIDRKRYTSTKEVLDATLIHQSITGLYETRIDLSQLGGDSRADPKKKRKV

SEQ ID NO: 7825 - protein, 1386 aa, synthetic construct
  REGION 1..1386: note = Description of Artificial Sequence: Synthetic polypeptide
MAPKKKRKVDKKYSIGLDIGTNSVGWAVITDEYKVPSKKFKVLGNTDRHSIKKNLIGALLFDSGETAEATRLKRTARRRYTRRKNRICYLQEIFSNEMAKVDDSFFHRLEESFLVEEDKKHERHPIFGNIVDEVAYHEKYPTIYHLRKKLVDSTDKADLRLIYLALAHMIKFRGHFLIEGDLNPDNSDVDKLFIQLVQTYNQLFEENPINASGVDAKAILSARLSKSRRLENLIAQLPGEKKNGLFGNLIALSLGLTPNFKSNFDLAEDAKLQLSKDTYDDDLDNLLAQIGDQYADLFLAAKNLSDAILLSDILRVNTEITKAPLSASMIKRYDEHHQDLTLLKALVRQQLPEKYKEIFFDQSKNGYAGYIDGGASQEEFYKFIKPILEKMDGTEELLVKLNREDLLRKQRTFDNGSIPHQIHLGELHAILRRQEDFYPFLKDNREKIEKILTFRIPYYVGPLARGNSRFAWMTRKSEETITPWNFEEVVDKGASAQSFIERMTNFDKNLPNEKVLPKHSLLYEYFTVYNELTKVKYVTEGMRKPAFLSGEQKKAIVDLLFKTNRKVTVKQLKEDYFKKIECFDSVEISGVEDRFNASLGTYHDLLKIIKDKDFLDNEENEDILEDIVLTLTLFEDREMIEERLKTYAHLFDDKVMKQLKRRRYTGWGRLSRKLINGIRDKQSGKTILDFLKSDGFANRNFMQLIHDDSLTFKEDIQKAQVSGQGDSLHEHIANLAGSPAIKKGILQTVKVVDELVKVMGRHKPENIVIEMARENQTTQKGQKNSRERMKRIEEGIKELGSQILKEHPVENTQLQNEKLYLYYLQNGRDMYVDQELDINRLSDYDVDHIVPQSFLKDDSIDNKVLTRSDKNRGKSDNVPSEEVVKKMKNYWRQLLNAKLITQRKFDNLTKAERGGLSELDKAGFIKRQLVETRQITKHVAQILDSRMNTKYDENDKLIREVKVITLKSKLVSDFRKDFQFYKVREINNYHHAHDAYLNAVVGTALIKKYPKLESEFVYGDYKVYDVRKMIAKSEQEIGKATAKYFFYSNIMNFFKTEITLANGEIRKRPLIETNGETGEIVWDKGRDFATVRKVLSMPQVNIVKKTEVQTGGFSKESILPKRNSDKLIARKKDWDPKKYGGFDSPTVAYSVLVVAKVEKGKSKKLKSVKELLGITIMERSSFEKNPIDFLEAKGYKEVKKDLIIKLPKYSLFELENGRKRMLASAGELQKGNELALPSKYVNFLYLASHYEKLKGSPEDNEQKQLFVEQHKHYLDEIIEQISEFSKRVILADANLDKVLSAYNKHRDKPIREQAENIIHLFTLTNLGAPAAFKYFDTTIDRKRYTSTKEVLDATLIHQSITGLYETRIDLSQLGGDSRADHHHHHH

SEQ ID NO: 7826 - protein, 1389 aa, synthetic construct
  REGION 1..1389: note = Description of Artificial Sequence: Synthetic polypeptide
MAHHHHHHGGSDKKYSIGLDIGTNSVGWAVITDEYKVPSKKFKVLGNTDRHSIKKNLIGALLFDSGETAEATRLKRTARRRYTRRKNRICYLQEIFSNEMAKVDDSFFHRLEESFLVEEDKKHERHPIFGNIVDEVAYHEKYPTIYHLRKKLVDSTDKADLRLIYLALAHMIKFRGHFLIEGDLNPDNSDVDKLFIQLVQTYNQLFEENPINASGVDAKAILSARLSKSRRLENLIAQLPGEKKNGLFGNLIALSLGLTPNFKSNFDLAEDAKLQLSKDTYDDDLDNLLAQIGDQYADLFLAAKNLSDAILLSDILRVNTEITKAPLSASMIKRYDEHHQDLTLLKALVRQQLPEKYKEIFFDQSKNGYAGYIDGGASQEEFYKFIKPILEKMDGTEELLVKLNREDLLRKQRTFDNGSIPHQIHLGELHAILRRQEDFYPFLKDNREKIEKILTFRIPYYVGPLARGNSRFAWMTRKSEETITPWNFEEVVDKGASAQSFIERMTNFDKNLPNEKVLPKHSLLYEYFTVYNELTKVKYVTEGMRKPAFLSGEQKKAIVDLLFKTNRKVTVKQLKEDYFKKIECFDSVEISGVEDRFNASLGTYHDLLKIIKDKDFLDNEENEDILEDIVLTLTLFEDREMIEERLKTYAHLFDDKVMKQLKRRRYTGWGRLSRKLINGIRDKQSGKTILDFLKSDGFANRNFMQLIHDDSLTFKEDIQKAQVSGQGDSLHEHIANLAGSPAIKKGILQTVKVVDELVKVMGRHKPENIVIEMARENQTTQKGQKNSRERMKRIEEGIKELGSQILKEHPVENTQLQNEKLYLYYLQNGRDMYVDQELDINRLSDYDVDHIVPQSFLKDDSIDNKVLTRSDKNRGKSDNVPSEEVVKKMKNYWRQLLNAKLITQRKFDNLTKAERGGLSELDKAGFIKRQLVETRQITKHVAQILDSRMNTKYDENDKLIREVKVITLKSKLVSDFRKDFQFYKVREINNYHHAHDAYLNAVVGTALIKKYPKLESEFVYGDYKVYDVRKMIAKSEQEIGKATAKYFFYSNIMNFFKTEITLANGEIRKRPLIETNGETGEIVWDKGRDFATVRKVLSMPQVNIVKKTEVQTGGFSKESILPKRNSDKLIARKKDWDPKKYGGFDSPTVAYSVLVVAKVEKGKSKKLKSVKELLGITIMERSSFEKNPIDFLEAKGYKEVKKDLIIKLPKYSLFELENGRKRMLASAGELQKGNELALPSKYVNFLYLASHYEKLKGSPEDNEQKQLFVEQHKHYLDEIIEQISEFSKRVILADANLDKVLSAYNKHRDKPIREQAENIIHLFTLTNLGAPAAFKYFDTTIDRKRYTSTKEVLDATLIHQSITGLYETRIDLSQLGGDSRADPKKKRKV

SEQ ID NO: 7827 - protein, 1399 aa, synthetic construct; identical to SEQ ID NO: 7823
  REGION 1..1399: note = Description of Artificial Sequence: Synthetic polypeptide

SEQ ID NO: 7828 - protein, 1393 aa, synthetic construct
  REGION 1..1393: note = Description of Artificial Sequence: Synthetic polypeptide
MAPKKKRKVDKKYSIGLDIGTNSVGWAVITDEYKVPSKKFKVLGNTDRHSIKKNLIGALLFDSGETAEATRLKRTARRRYTRRKNRICYLQEIFSNEMAKVDDSFFHRLEESFLVEEDKKHERHPIFGNIVDEVAYHEKYPTIYHLRKKLVDSTDKADLRLIYLALAHMIKFRGHFLIEGDLNPDNSDVDKLFIQLVQTYNQLFEENPINASGVDAKAILSARLSKSRRLENLIAQLPGEKKNGLFGNLIALSLGLTPNFKSNFDLAEDAKLQLSKDTYDDDLDNLLAQIGDQYADLFLAAKNLSDAILLSDILRVNTEITKAPLSASMIKRYDEHHQDLTLLKALVRQQLPEKYKEIFFDQSKNGYAGYIDGGASQEEFYKFIKPILEKMDGTEELLVKLNREDLLRKQRTFDNGSIPHQIHLGELHAILRRQEDFYPFLKDNREKIEKILTFRIPYYVGPLARGNSRFAWMTRKSEETITPWNFEEVVDKGASAQSFIERMTNFDKNLPNEKVLPKHSLLYEYFTVYNELTKVKYVTEGMRKPAFLSGEQKKAIVDLLFKTNRKVTVKQLKEDYFKKIECFDSVEISGVEDRFNASLGTYHDLLKIIKDKDFLDNEENEDILEDIVLTLTLFEDREMIEERLKTYAHLFDDKVMKQLKRRRYTGWGRLSRKLINGIRDKQSGKTILDFLKSDGFANRNFMQLIHDDSLTFKEDIQKAQVSGQGDSLHEHIANLAGSPAIKKGILQTVKVVDELVKVMGRHKPENIVIEMARENQTTQKGQKNSRERMKRIEEGIKELGSQILKEHPVENTQLQNEKLYLYYLQNGRDMYVDQELDINRLSDYDVDHIVPQSFLKDDSIDNAVLTRSDKNRGKSDNVPSEEVVKKMKNYWRQLLNAKLITQRKFDNLTKAERGGLSELDKAGFIKRQLVETRQITKHVAQILDSRMNTKYDENDKLIREVKVITLKSKLVSDFRKDFQFYKVREINNYHHAHDAYLNAVVGTALIKKYPKLESEFVYGDYKVYDVRKMIAKSEQEIGKATAKYFFYSNIMNFFKTEITLANGEIRKRPLIETNGETGEIVWDKGRDFATVRKVLSMPQVNIVKKTEVQTGGFSKESILPKRNSDKLIARKKDWDPKKYGGFDSPTVAYSVLVVAKVEKGKSKKLKSVKELLGITIMERSSFEKNPIDFLEAKGYKEVKKDLIIKLPKYSLFELENGRKRMLASAGELQKGNELALPSKYVNFLYLASHYEKLKGSPEDNEQKQLFVEQHKHYLDEIIEQISEFSKRVILADANLDKVLSAYNKHRDKPIREQAENIIHLFTLTNLGAPAAFKYFDTTIDRKRYTSTKEVLDATLIHQSITGLYETRIDLSQLGGDSRADPKKKRKVHHHHHH

SEQ ID NO: 7829 - protein, 1393 aa, synthetic construct
  REGION 1..1393: note = Description of Artificial Sequence: Synthetic polypeptide
MAPKKKRKVDKKYSIGLDIGTNSVGWAVITDEYKVPSKKFKVLGNTDRHSIKKNLIGALLFDSGETAEATRLKRTARRRYTRRKNRICYLQEIFSNEMAKVDDSFFHRLEESFLVEEDKKHERHPIFGNIVDEVAYHEKYPTIYHLRKKLVDSTDKADLRLIYLALAHMIKFRGHFLIEGDLNPDNSDVDKLFIQLVQTYNQLFEENPINASGVDAKAILSARLSKSRRLENLIAQLPGEKKNGLFGNLIALSLGLTPNFKSNFDLAEDAKLQLSKDTYDDDLDNLLAQIGDQYADLFLAAKNLSDAILLSDILRVNTEITKAPLSASMIKRYDEHHQDLTLLKALVRQQLPEKYKEIFFDQSKNGYAGYIDGGASQEEFYKFIKPILEKMDGTEELLVKLNREDLLRKQRTFDNGSIPHQIHLGELHAILRRQEDFYPFLKDNREKIEKILTFRIPYYVGPLARGNSRFAWMTRKSEETITPWNFEEVVDKGASAQSFIERMTNFDKNLPNEKVLPKHSLLYEYFTVYNELTKVKYVTEGMRKPAFLSGEQKKAIVDLLFKTNRKVTVKQLKEDYFKKIECFDSVEISGVEDRFNASLGTYHDLLKIIKDKDFLDNEENEDILEDIVLTLTLFEDREMIEERLKTYAHLFDDKVMKQLKRRRYTGWGRLSRKLINGIRDKQSGKTILDFLKSDGFANRNFMQLIHDDSLTFKEDIQKAQVSGQGDSLHEHIANLAGSPAIKKGILQTVKVVDELVKVMGRHKPENIVIEMARENQTTQKGQKNSRERMKRIEEGIKELGSQILKEHPVENTQLQNEALYLYYLQNGRDMYVDQELDINRLSDYDVDHIVPQSFLKDDSIDNKVLTRSDKNRGKSDNVPSEEVVKKMKNYWRQLLNAKLITQRKFDNLTKAERGGLSELDKAGFIKRQLVETRQITKHVAQILDSRMNTKYDENDKLIREVKVITLKSKLVSDFRKDFQFYKVREINNYHHAHDAYLNAVVGTALIKKYPALESEFVYGDYKVYDVRKMIAKSEQEIGKATAKYFFYSNIMNFFKTEITLANGEIRKAPLIETNGETGEIVWDKGRDFATVRKVLSMPQVNIVKKTEVQTGGFSKESILPKRNSDKLIARKKDWDPKKYGGFDSPTVAYSVLVVAKVEKGKSKKLKSVKELLGITIMERSSFEKNPIDFLEAKGYKEVKKDLIIKLPKYSLFELENGRKRMLASAGELQKGNELALPSKYVNFLYLASHYEKLKGSPEDNEQKQLFVEQHKHYLDEIIEQISEFSKRVILADANLDKVLSAYNKHRDKPIREQAENIIHLFTLTNLGAPAAFKYFDTTIDRKRYTSTKEVLDATLIHQSITGLYETRIDLSQLGGDSRADPKKKRKVHHHHHH

SEQ ID NO: 7830 - protein, 1393 aa, synthetic construct
  REGION 1..1393: note = Description of Artificial Sequence: Synthetic polypeptide
MAPKKKRKVDKKYSIGLDIGTNSVGWAVITDEYKVPSKKFKVLGNTDRHSIKKNLIGALLFDSGETAEATRLKRTARRRYTRRKNRICYLQEIFSNEMAKVDDSFFHRLEESFLVEEDKKHERHPIFGNIVDEVAYHEKYPTIYHLRKKLVDSTDKADLRLIYLALAHMIKFRGHFLIEGDLNPDNSDVDKLFIQLVQTYNQLFEENPINASGVDAKAILSARLSKSRRLENLIAQLPGEKKNGLFGNLIALSLGLTPNFKSNFDLAEDAKLQLSKDTYDDDLDNLLAQIGDQYADLFLAAKNLSDAILLSDILRVNTEITKAPLSASMIKRYDEHHQDLTLLKALVRQQLPEKYKEIFFDQSKNGYAGYIDGGASQEEFYKFIKPILEKMDGTEELLVKLNREDLLRKQRTFDNGSIPHQIHLGELHAILRRQEDFYPFLKDNREKIEKILTFRIPYYVGPLARGNSRFAWMTRKSEETITPWNFEEVVDKGASAQSFIERMTNFDKNLPNEKVLPKHSLLYEYFTVYNELTKVKYVTEGMRKPAFLSGEQKKAIVDLLFKTNRKVTVKQLKEDYFKKIECFDSVEISGVEDRFNASLGTYHDLLKIIKDKDFLDNEENEDILEDIVLTLTLFEDREMIEERLKTYAHLFDDKVMKQLKRRRYTGWGRLSRKLINGIRDKQSGKTILDFLKSDGFANRNFMQLIHDDSLTFKEDIQKAQVSGQGDSLHEHIANLAGSPAIKKGILQTVKVVDELVKVMGRHKPENIVIEMARENQTTQKGQKNSRERMKRIEEGIKELGSQILKEHPVENTQLQNEKLYLYYLQNGRDMYVDQELDINRLSDYDVDHIVPQSFLADDSIDNKVLTRSDKNRGKSDNVPSEEVVKKMKNYWRQLLNAKLITQRKFDNLTKAERGGLSELDKAGFIKRQLVETRQITKHVAQILDSRMNTKYDENDKLIREVKVITLKSKLVSDFRKDFQFYKVREINNYHHAHDAYLNAVVGTALIKKYPALESEFVYGDYKVYDVRKMIAKSEQEIGKATAKYFFYSNIMNFFKTEITLANGEIRKAPLIETNGETGEIVWDKGRDFATVRKVLSMPQVNIVKKTEVQTGGFSKESILPKRNSDKLIARKKDWDPKKYGGFDSPTVAYSVLVVAKVEKGKSKKLKSVKELLGITIMERSSFEKNPIDFLEAKGYKEVKKDLIIKLPKYSLFELENGRKRMLASAGELQKGNELALPSKYVNFLYLASHYEKLKGSPEDNEQKQLFVEQHKHYLDEIIEQISEFSKRVILADANLDKVLSAYNKHRDKPIREQAENIIHLFTLTNLGAPAAFKYFDTTIDRKRYTSTKEVLDATLIHQSITGLYETRIDLSQLGGDSRADPKKKRKVHHHHHH

SEQ ID NO: 7831 - protein, 1393 aa, synthetic construct
  REGION 1..1393: note = Description of Artificial Sequence: Synthetic polypeptide
MAPKKKRKVDKKYSIGLDIGTNSVGWAVITDEYKVPSKKFKVLGNTDRHSIKKNLIGALLFDSGETAEATRLKRTARRRYTRRKNRICYLQEIFSNEMAKVDDSFFHRLEESFLVEEDKKHERHPIFGNIVDEVAYHEKYPTIYHLRKKLVDSTDKADLRLIYLALAHMIKFRGHFLIEGDLNPDNSDVDKLFIQLVQTYNQLFEENPINASGVDAKAILSARLSKSRRLENLIAQLPGEKKNGLFGNLIALSLGLTPNFKSNFDLAEDAKLQLSKDTYDDDLDNLLAQIGDQYADLFLAAKNLSDAILLSDILRVNTEITKAPLSASMIKRYDEHHQDLTLLKALVRQQLPEKYKEIFFDQSKNGYAGYIDGGASQEEFYKFIKPILEKMDGTEELLVKLNREDLLRKQRTFDNGSIPHQIHLGELHAILRRQEDFYPFLKDNREKIEKILTFRIPYYVGPLARGNSRFAWMTRKSEETITPWNFEEVVDKGASAQSFIERMTAFDKNLPNEKVLPKHSLLYEYFTVYNELTKVKYVTEGMRKPAFLSGEQKKAIVDLLFKTNRKVTVKQLKEDYFKKIECFDSVEISGVEDRFNASLGTYHDLLKIIKDKDFLDNEENEDILEDIVLTLTLFEDREMIEERLKTYAHLFDDKVMKQLKRRRYTGWGALSRKLINGIRDKQSGKTILDFLKSDGFANRNFMALIHDDSLTFKEDIQKAQVSGQGDSLHEHIANLAGSPAIKKGILQTVKVVDELVKVMGRHKPENIVIEMARENQTTQKGQKNSRERMKRIEEGIKELGSQILKEHPVENTQLQNEKLYLYYLQNGRDMYVDQELDINRLSDYDVDHIVPQSFLKDDSIDNKVLTRSDKNRGKSDNVPSEEVVKKMKNYWRQLLNAKLITQRKFDNLTKAERGGLSELDKAGFIKRQLVETRAITKHVAQILDSRMNTKYDENDKLIREVKVITLKSKLVSDFRKDFQFYKVREINNYHHAHDAYLNAVVGTALIKKYPKLESEFVYGDYKVYDVRKMIAKSEQEIGKATAKYFFYSNIMNFFKTEITLANGEIRKRPLIETNGETGEIVWDKGRDFATVRKVLSMPQVNIVKKTEVQTGGFSKESILPKRNSDKLIARKKDWDPKKYGGFDSPTVAYSVLVVAKVEKGKSKKLKSVKELLGITIMERSSFEKNPIDFLEAKGYKEVKKDLIIKLPKYSLFELENGRKRMLASAGELQKGNELALPSKYVNFLYLASHYEKLKGSPEDNEQKQLFVEQHKHYLDEIIEQISEFSKRVILADANLDKVLSAYNKHRDKPIREQAENIIHLFTLTNLGAPAAFKYFDTTIDRKRYTSTKEVLDATLIHQSITGLYETRIDLSQLGGDSRADPKKKRKVHHHHHH

SEQ ID NO: 7832 - RNA, 36 nt, synthetic construct; identical to SEQ ID NO: 2003
  source 1..36: mol_type = other RNA
  misc_difference 1: note = 2'-O-methyl modified adenosine, cytidine, uridine, guanosine, unknown or other nucleotide with phosphorothioate linkage
  misc_difference 2: note = 2'-O-methyl modified adenosine, cytidine, uridine, guanosine, unknown or other nucleotide with phosphorothioate linkage
  misc_difference 3: note = 2'-O-methyl modified adenosine, cytidine, uridine, guanosine, unknown or other nucleotide with phosphorothioate linkage
  misc_difference 4: note = a, c, u, g, unknown or other
  misc_difference 5: note = a, c, u, g, unknown or other
  misc_difference 6: note = a, c, u, g, unknown or other
  misc_difference 7: note = a, c, u, g, unknown or other
  misc_difference 8: note = a, c, u, g, unknown or other
  misc_difference 9: note = a, c, u, g, unknown or other
  misc_difference 10: note = a, c, u, g, unknown or other
  misc_difference 11: note = a, c, u, g, unknown or other
  misc_difference 12: note = a, c, u, g, unknown or other
  misc_difference 13: note = a, c, u, g, unknown or other
  misc_difference 14: note = a, c, u, g, unknown or other
  misc_difference 15: note = a, c, u, g, unknown or other
  misc_difference 16: note = a, c, u, g, unknown or other
  misc_difference 17: note = a, c, u, g, unknown or other
  misc_difference 18: note = a, c, u, g, unknown or other
  misc_difference 19: note = a, c, u, g, unknown or other
  misc_difference 20: note = a, c, u, g, unknown or other
  modified_base 33: mod_base = OTHER; note = nucleotide with phosphorothioate linkage
  modified_base 34: mod_base = OTHER; note = 2'-O-methyl modified nucleotide with phosphorothioate linkage
  modified_base 35: mod_base = OTHER; note = 2'-O-methyl modified nucleotide with phosphorothioate linkage
  modified_base 36: mod_base = OTHER; note = 2'-O-methyl modified nucleotide

SEQ ID NO: 7833 - RNA, 36 nt, synthetic construct; identical to SEQ ID NO: 2003
  source 1..36: mol_type = other RNA
  misc_difference 1: note = 2'-O-methyl modified adenosine, cytidine, uridine, guanosine, unknown or other nucleotide with phosphorothioate linkage
  misc_difference 2: note = 2'-O-methyl modified adenosine, cytidine, uridine, guanosine, unknown or other nucleotide with phosphorothioate linkage
  misc_difference 3: note = 2'-O-methyl modified adenosine, cytidine, uridine, guanosine, unknown or other nucleotide with phosphorothioate linkage
  misc_difference 4: note = a, c, u, g, unknown or other
  misc_difference 5: note = a, c, u, g, unknown or other
  misc_difference 6: note = a, c, u, g, unknown or other
  misc_difference 7: note = a, c, u, g, unknown or other
  misc_difference 8: note = a, c, u, g, unknown or other
  misc_difference 9: note = a, c, u, g, unknown or other
  misc_difference 10: note = a, c, u, g, unknown or other
  misc_difference 11: note = a, c, u, g, unknown or other
  misc_difference 12: note = a, c, u, g, unknown or other
  misc_difference 13: note = a, c, u, g, unknown or other
  misc_difference 14: note = a, c, u, g, unknown or other
  misc_difference 15: note = a, c, u, g, unknown or other
  misc_difference 16: note = a, c, u, g, unknown or other
  misc_difference 17: note = a, c, u, g, unknown or other
  misc_difference 18: note = a, c, u, g, unknown or other
  misc_difference 19: note = a, c, u, g, unknown or other
  misc_difference 20: note = a, c, u, g, unknown or other
  modified_base 33: mod_base = OTHER; note = nucleotide with phosphorothioate linkage
  modified_base 34: mod_base = OTHER; note = 2'-O-methyl modified nucleotide with phosphorothioate linkage
  modified_base 35: mod_base = OTHER; note = 2'-O-methyl modified nucleotide with phosphorothioate linkage
  modified_base 36: mod_base = OTHER; note = 2'-O-methyl modified nucleotide

SEQ ID NO: 7834 - RNA, 42 nt, synthetic construct; identical to SEQ ID NO: 2010
  source 1..42: mol_type = other RNA
  misc_difference 1: note = 2'-O-methyl modified adenosine, cytidine, uridine, guanosine, unknown or other nucleotide with phosphorothioate linkage
  misc_difference 2: note = 2'-O-methyl modified adenosine, cytidine, uridine, guanosine, unknown or other nucleotide with phosphorothioate linkage
  misc_difference 3: note = 2'-O-methyl modified adenosine, cytidine, uridine, guanosine, unknown or other nucleotide with phosphorothioate linkage
  misc_difference 4: note = a, c, u, g, unknown or other
  misc_difference 5: note = a, c, u, g, unknown or other
  misc_difference 6: note = a, c, u, g, unknown or other
  misc_difference 7: note = a, c, u, g, unknown or other
  misc_difference 8: note = a, c, u, g, unknown or other
  misc_difference 9: note = a, c, u, g, unknown or other
  misc_difference 10: note = a, c, u, g, unknown or other
  misc_difference 11: note = a, c, u, g, unknown or other
  misc_difference 12: note = a, c, u, g, unknown or other
  misc_difference 13: note = a, c, u, g, unknown or other
  misc_difference 14: note = a, c, u, g, unknown or other
  misc_difference 15: note = a, c, u, g, unknown or other
  misc_difference 16: note = a, c, u, g, unknown or other
  misc_difference 17: note = a, c, u, g, unknown or other
  misc_difference 18: note = a, c, u, g, unknown or other
  misc_difference 19: note = a, c, u, g, unknown or other
  misc_difference 20: note = a, c, u, g, unknown or other
  modified_base 39: mod_base = OTHER; note = nucleotide with phosphorothioate linkage
  modified_base 40: mod_base = OTHER; note = 2'-O-methyl modified nucleotide with phosphorothioate linkage
  modified_base 41: mod_base = OTHER; note = 2'-O-methyl modified nucleotide with phosphorothioate linkage
  modified_base 42: mod_base = OTHER; note = 2'-O-methyl modified nucleotide

SEQ ID NO: 7835 - RNA, 100 nt, synthetic construct; identical to SEQ ID NO: 2013
  source 1..100: mol_type = other RNA
  misc_difference 1: note = 2'-O-methyl modified adenosine, cytidine, uridine, guanosine, unknown or other nucleotide with phosphorothioate linkage
  misc_difference 2: note = 2'-O-methyl modified adenosine, cytidine, uridine, guanosine, unknown or other nucleotide with phosphorothioate linkage
  misc_difference 3: note = 2'-O-methyl modified adenosine, cytidine, uridine, guanosine, unknown or other nucleotide with phosphorothioate linkage
  misc_difference 4: note = a, c, u, g, unknown or other
  misc_difference 5: note = a, c, u, g, unknown or other
  misc_difference 6: note = a, c, u, g, unknown or other
  misc_difference 7: note = a, c, u, g, unknown or other
  misc_difference 8: note = a, c, u, g, unknown or other
  misc_difference 9: note = a, c, u, g, unknown or other
  misc_difference 10: note = a, c, u, g, unknown or other
  misc_difference 11: note = a, c, u, g, unknown or other
  misc_difference 12: note = a, c, u, g, unknown or other
  misc_difference 13: note = a, c, u, g, unknown or other
  misc_difference 14: note = a, c, u, g, unknown or other
  misc_difference 15: note = a, c, u, g, unknown or other
  misc_difference 16: note = a, c, u, g, unknown or other
  misc_difference 17: note = a, c, u, g, unknown or other
  misc_difference 18: note = a, c, u, g, unknown or other
  misc_difference 19: note = a, c, u, g, unknown or other
  misc_difference 20: note = a, c, u, g, unknown or other
  modified_base 97: mod_base = OTHER; note = nucleotide with phosphorothioate linkage
  modified_base 98: mod_base = OTHER; note = 2'-O-methyl modified nucleotide with phosphorothioate linkage
  modified_base 99: mod_base = OTHER; note = 2'-O-methyl modified nucleotide with phosphorothioate linkage
  modified_base 100: mod_base = OTHER; note = 2'-O-methyl modified nucleotide

SEQ ID NO: 7836 - RNA, 100 nt, synthetic construct; identical to SEQ ID NO: 2013
  source 1..100: mol_type = other RNA
  misc_difference 1: note = 2'-O-methyl modified adenosine, cytidine, uridine, guanosine, unknown or other nucleotide with phosphorothioate linkage
  misc_difference 2: note = 2'-O-methyl modified adenosine, cytidine, uridine, guanosine, unknown or other nucleotide with phosphorothioate linkage
  misc_difference 3: note = 2'-O-methyl modified adenosine, cytidine, uridine, guanosine, unknown or other nucleotide with phosphorothioate linkage
  misc_difference 4: note = a, c, u, g, unknown or other
  misc_difference 5: note = a, c, u, g, unknown or other
  misc_difference 6: note = a, c, u, g, unknown or other
  misc_difference 7: note = a, c, u, g, unknown or other
  misc_difference 8: note = a, c, u, g, unknown or other
  misc_difference 9: note = a, c, u, g, unknown or other
  misc_difference 10: note = a, c, u, g, unknown or other
  misc_difference 11: note = a, c, u, g, unknown or other
  misc_difference 12: note = a, c, u, g, unknown or other
  misc_difference 13: note = a, c, u, g, unknown or other
  misc_difference 14: note = a, c, u, g, unknown or other
  misc_difference 15: note = a, c, u, g, unknown or other
  misc_difference 16: note = a, c, u, g, unknown or other
  misc_difference 17: note = a, c, u, g, unknown or other
  misc_difference 18: note = a, c, u, g, unknown or other
  misc_difference 19: note = a, c, u, g, unknown or other
  misc_difference 20: note = a, c, u, g, unknown or other
  modified_base 97: mod_base = OTHER; note = 2'-O-methyl modified nucleotide with phosphorothioate linkage
  modified_base 98: mod_base = OTHER; note = 2'-O-methyl modified nucleotide with phosphorothioate linkage
  modified_base 99: mod_base = OTHER; note = 2'-O-methyl modified nucleotide with phosphorothioate linkage

SEQ ID NO: 7837 - RNA, 36 nt, synthetic construct; identical to SEQ ID NO: 2470
  source 1..36: mol_type = other RNA
  modified_base 1: mod_base = OTHER; note = 2'-O-methyl modified nucleotide with phosphorothioate linkage
  modified_base 2: mod_base = OTHER; note = 2'-O-methyl modified nucleotide with phosphorothioate linkage
  modified_base 3: mod_base = OTHER; note = 2'-O-methyl modified nucleotide with phosphorothioate linkage
  modified_base 33: mod_base = OTHER; note = nucleotide with phosphorothioate linkage
  modified_base 34: mod_base = OTHER; note = 2'-O-methyl modified nucleotide with phosphorothioate linkage
  modified_base 35: mod_base = OTHER; note = 2'-O-methyl modified nucleotide with phosphorothioate linkage
  modified_base 36: mod_base = OTHER; note = 2'-O-methyl modified nucleotide

SEQ ID NO: 7838 - RNA, 100 nt, synthetic construct; identical to SEQ ID NO: 2013
  source 1..100: mol_type = other RNA
  misc_difference 1: note = adenosine, cytidine, uridine, guanosine, unknown or other nucleotide with phosphorothioate linkage
  misc_difference 2: note = adenosine, cytidine, uridine, guanosine, unknown or other nucleotide with phosphorothioate linkage
  misc_difference 3: note = adenosine, cytidine, uridine, guanosine, unknown or other nucleotide with phosphorothioate linkage
  misc_difference 4: note = a, c, u, g, unknown or other
  misc_difference 5: note = a, c, u, g, unknown or other
  misc_difference 6: note = a, c, u, g, unknown or other
  misc_difference 7: note = a, c, u, g, unknown or other
  misc_difference 8: note = a, c, u, g, unknown or other
  misc_difference 9: note = a, c, u, g, unknown or other
  misc_difference 10: note = a, c, u, g, unknown or other
  misc_difference 11: note = a, c, u, g, unknown or other
  misc_difference 12: note = a, c, u, g, unknown or other
  misc_difference 13: note = a, c, u, g, unknown or other
  misc_difference 14: note = a, c, u, g, unknown or other
  misc_difference 15: note = a, c, u, g, unknown or other
  misc_difference 16: note = a, c, u, g, unknown or other
  misc_difference 17: note = a, c, u, g, unknown or other
  misc_difference 18: note = a, c, u, g, unknown or other
  misc_difference 19: note = a, c, u, g, unknown or other
  misc_difference 20: note = a, c, u, g, unknown or other
  modified_base 97: mod_base = OTHER; note = nucleotide with phosphorothioate linkage
  modified_base 98: mod_base = OTHER; note = nucleotide with phosphorothioate linkage
  modified_base 99: mod_base = OTHER; note = nucleotide with phosphorothioate linkage

SEQ ID NO: 7839 - RNA, 42 nt, synthetic construct; identical to SEQ ID NO: 2010
  source 1..42: mol_type = other RNA
  misc_difference 1: note = adenosine, cytidine, uridine, guanosine, unknown or other nucleotide with phosphorothioate linkage
  misc_difference 2: note = adenosine, cytidine, uridine, guanosine, unknown or other nucleotide with phosphorothioate linkage
  misc_difference 3: note = adenosine, cytidine, uridine, guanosine, unknown or other nucleotide with phosphorothioate linkage
  misc_difference 4: note = a, c, u, g, unknown or other
  misc_difference 5: note = a, c, u, g, unknown or other
  misc_difference 6: note = a, c, u, g, unknown or other
  misc_difference 7: note = a, c, u, g, unknown or other
  misc_difference 8: note = a, c, u, g, unknown or other
  misc_difference 9: note = a, c, u, g, unknown or other
  misc_difference 10: note = a, c, u, g, unknown or other
  misc_difference 11: note = a, c, u, g, unknown or other
  misc_difference 12: note = a, c, u, g, unknown or other
  misc_difference 13: note = a, c, u, g, unknown or other
  misc_difference 14: note = a, c, u, g, unknown or other
  misc_difference 15: note = a, c, u, g, unknown or other
  misc_difference 16: note = a, c, u, g, unknown or other
  misc_difference 17: note = a, c, u, g, unknown or other
  misc_difference 18: note = a, c, u, g, unknown or other
  misc_difference 19: note = a, c, u, g, unknown or other
  misc_difference 20: note = a, c, u, g, unknown or other
  modified_base 39: mod_base = OTHER; note = nucleotide with phosphorothioate linkage
  modified_base 40: mod_base = OTHER; note = nucleotide with phosphorothioate linkage
  modified_base 41: mod_base = OTHER; note = nucleotide with phosphorothioate linkage

1.-230. (canceled)

231. A gRNA molecule comprising a tracr and crRNA, wherein the crRNA comprises a targeting domain that is complementary with a target sequence of a human BCL11a gene, a human BCL11a enhancer, or a human HPFH region, wherein
(a) the target sequence is of the human BCL11a gene, and the targeting domain comprises any one of SEQ ID NO: 1 to SEQ ID NO: 85 or SEQ ID NO: 400 to SEQ ID NO: 1231, or a fragment thereof;
(b) the target sequence is of the human BCL11a enhancer, and the targeting domain comprises any one of SEQ ID NO: 182 to SEQ ID NO: 277, or SEQ ID NO: 278 to SEQ ID NO: 333, or SEQ ID NO: 334 to SEQ ID NO: 341, or SEQ ID NO: 1232 to SEQ ID NO: 1499, or SEQ ID NO: 1596 to SEQ ID NO: 1691, or a fragment thereof; or
(c) the target sequence is of the human HFPH region, and the targeting domain comprises any one of SEQ ID NO: 86 to SEQ ID NO: 181, SEQ ID NO: 1500 to SEQ ID NO: 1595, or SEQ ID NO: 1692 to SEQ ID NO: 1761, or a fragment thereof.

232. The gRNA molecule of claim 231, wherein,
(a) the targeting domain comprises any one of SEQ ID NO: 338, SEQ ID NO: 248, SEQ ID NO: 253, SEQ ID NO: 341, SEQ ID NO: 246, SEQ ID NO: 247, SEQ ID NO: 245, SEQ ID NO: 249, SEQ ID NO: 244, SEQ ID NO: 199, SEQ ID NO: 251, SEQ ID NO: 250, SEQ ID NO: 334, SEQ ID NO: 185, SEQ ID NO: 186, SEQ ID NO: 335, SEQ ID NO: 336, or SEQ ID NO: 337, or a fragment thereof;
(b) the targeting domain comprises any one of SEQ ID NO: 318, SEQ ID NO: 312, SEQ ID NO: 313, SEQ ID NO: 294, SEQ ID NO: 310, SEQ ID NO: 319, SEQ ID NO: 298, SEQ ID NO: 322, SEQ ID NO: 311, SEQ ID NO: 315, SEQ ID NO: 290, SEQ ID NO: 317, SEQ ID NO: 309, SEQ ID NO: 289, or SEQ ID NO: 281, or a fragment thereof;
(c) the targeting domain comprises any one of SEQ ID NO: 1683, SEQ ID NO: 1638, SEQ ID NO: 1647, SEQ ID NO: 1609, SEQ ID NO: 1621, SEQ ID NO: 1617, SEQ ID NO: 1654, SEQ ID NO: 1631, SEQ ID NO: 1620, SEQ ID NO: 1637, SEQ ID NO: 1612, SEQ ID NO: 1656, SEQ ID NO: 1619, SEQ ID NO: 1675, SEQ ID NO: 1645, SEQ ID NO: 1598, SEQ ID NO: 1599, SEQ ID NO: 1663, SEQ ID NO: 1677, or SEQ ID NO: 1626, or a fragment thereof; or
(d) the targeting domain comprises any one of SEQ ID NO: 100, SEQ ID NO: 165, SEQ ID NO: 113, SEQ ID NO: 99, SEQ ID NO: 112, SEQ ID NO: 98, SEQ ID NO: 1505, SEQ ID NO: 1580, SEQ ID NO: 106, SEQ ID NO: 1503, SEQ ID NO: 1589, SEQ ID NO: 160, SEQ ID NO: 1537, SEQ ID NO: 159, SEQ ID NO: 101, SEQ ID NO: 162, SEQ ID NO: 104, SEQ ID NO: 138, SEQ ID NO: 1536, SEQ ID NO: 1539, SEQ ID NO: 1585, SEQ ID NO: 1700, or SEQ ID NO: 1750, or a fragment thereof.

233. The gRNA molecule of claim 231, comprising, from 5′ to 3′, [the targeting domain]—:
(a) SEQ ID NO: 6601;
(b) SEQ ID NO: 6602;
(c) SEQ ID NO: 6603;
(d) SEQ ID NO: 6604;
(e) SEQ ID NO: 7811; or
(f) any of (a) to (e), above, further comprising, at the 3′ end, 1, 2, 3, 4, 5, 6 or 7 uracil (U) nucleotides.

234. The gRNA molecule of claim 231, wherein one or more nucleic acid molecules of the gRNA molecule comprise:
(a) one or more phosphorothioate modifications at the 3′ end of said one or more nucleic acid molecules;
(b) one or more phosphorothioate modifications at the 5′ end of said one or more nucleic acid molecules;
(c) one or more 2′-O-methyl modifications at the 3′ end of said one or more nucleic acid molecules;
(d) one or more 2′-O-methyl modifications at the 5′ end of said one or more nucleic acid molecules;
(e) a 2′-O-methyl modification at each of the 4th-to-terminal, 3rd-to-terminal, and 2nd-to-terminal 3′ residues of said one or more nucleic acid molecules;
(f) a 2′-O-methyl modification at each of the 4th-to-terminal, 3rd-to-terminal, and 2nd-to-terminal 5′ residues of said one or more nucleic acid molecules; or
(g) any combination thereof.

235. The gRNA molecule of claim 231, comprising:
(a) SEQ ID NO: 342;
(b) SEQ ID NO: 343;
(c) SEQ ID NO: 1762;
(d) a crRNA comprising SEQ ID NO: 344, and a tracr comprising SEQ ID NO: 6660;
(e) a crRNA comprising SEQ ID NO: 344, and a tracr comprising SEQ ID NO: 346;
(f) a crRNA comprising SEQ ID NO: 345, and a tracr comprising SEQ ID NO: 6660;
(g) a crRNA comprising SEQ ID NO: 345, and a tracr comprising SEQ ID NO: 346;
(h) SEQ ID NO: 347;
(i) SEQ ID NO: 348;
(j) SEQ ID NO: 1763;
(k) a crRNA comprising SEQ ID NO: 349, and a tracr comprising SEQ ID NO: 6660;
(l) a crRNA comprising SEQ ID NO: 349, and a tracr comprising SEQ ID NO:
(m) a crRNA comprising SEQ ID NO: 350, and a tracr comprising SEQ ID NO: 6660; or
(n) a crRNA comprising SEQ ID NO: 350, and a tracr comprising SEQ ID NO: 346.

236. A composition comprising:
(a) one or more gRNA molecules of claim 231 and a Cas9 molecule;
(b) one or more gRNA molecules of claim 231 and a polynucleotide comprising a nucleic acid sequence encoding a Cas9 molecule;
(c) a nucleic acid sequence encoding one or more gRNA molecules of claim 231 and a Cas9 molecule;
(d) a polynucleotide comprising a nucleic acid sequence encoding one or more gRNA molecules of claim 231 and a polynucleotide comprising a nucleic acid sequence encoding a Cas9 molecule; or
(e) any of (a) to (d) above, and a template nucleic acid; or
(f) any of (a) to (d) above, and a polynucleotide comprising a nucleic acid sequence encoding a template nucleic acid.

237. The composition of claim 236, wherein the Cas9 molecule is an active or inactive S. pyogenes Cas9.

238. The composition of claim 236, wherein the Cas9 molecule comprises SEQ ID NO: 6611, or a sequence with at least 95% sequence homology thereto.

239. The composition of claim 236, wherein the Cas9 molecule comprises:
(a) SEQ ID NO: 7821;
(b) SEQ ID NO: 7822;
(c) SEQ ID NO: 7823;
(d) SEQ ID NO: 7824;
(e) SEQ ID NO: 7825;
(f) SEQ ID NO: 7825, further comprising a leucine at position 88 (C88L) of SEQ ID NO: 7825, and comprising a glutamic acid at position 582 (C582E) of SEQ ID NO: 7825;
(g) SEQ ID NO: 7826;
(h) SEQ ID NO: 7827;
(i) SEQ ID NO: 7828;
(j) SEQ ID NO: 7829;
(k) SEQ ID NO: 7830; or
(l) SEQ ID NO: 7831.

240. A polynucleotide comprising a nucleic acid sequence that encodes one or more gRNA molecules of claim 231.

241. A vector comprising the polynucleotide of claim 240.

242. A method of altering a cell at or near the target sequence of one or more gRNA molecules within said cell, comprising contacting said cell with:
(a) one or more gRNA molecules of claim 231 and a Cas9 molecule;
(b) one or more gRNA molecules of claim 231 and a polynucleotide comprising a nucleic acid sequence encoding a Cas9 molecule;
(c) a polynucleotide comprising a nucleic acid sequence encoding said one or more gRNA molecules of claim 231 and a Cas9 molecule;
(d) a polynucleotide comprising a nucleic acid sequence encoding said one or more gRNA molecules of claim 231 and a polynucleotide comprising a nucleic acid sequence encoding a Cas9 molecule;
(e) any of (a) to (d) above, and a template nucleic acid; or
(f) any of (a) to (d) above, and a polynucleotide comprising a nucleic sequence encoding a template nucleic acid.

243. The method of claim 242, wherein the cell is a mammalian, primate, or human cell.

244. The method of claim 243, wherein the cell is a hematopoietic stem or progenitor cell (HSPC); a CD34+ cell; a CD34+CD90+ cell; a cell disposed in a composition comprising a population of cells that has been enriched for CD34+ cells; a cell that has been isolated from bone marrow, mobilized peripheral blood, or umbilical cord blood.

245. The method of claim 242, wherein the altering results in an indel at or near the target sequence of the one or more gRNA molecules.

246. A cell, comprising a gRNA molecule of claim 231 and a Cas9 molecule.

247. The cell of claim 246, wherein the Cas9 molecule comprises:
(a) SEQ ID NO: 7821;
(b) SEQ ID NO: 7822;
(c) SEQ ID NO: 7823;
(d) SEQ ID NO: 7824;
(e) SEQ ID NO: 7825;
(f) SEQ ID NO: 7825, further comprising a leucine at position 88 (C88L) of SEQ ID NO: 7825, and comprising a glutamic acid at position 582 (C582E) of SEQ ID NO: 7825;
(g) SEQ ID NO: 7826;
(h) SEQ ID NO: 7827;
(i) SEQ ID NO: 7828;
(j) SEQ ID NO: 7829;
(k) SEQ ID NO: 7830; or
(l) SEQ ID NO: 7831.

248. The cell of claim 246, wherein expression of fetal hemoglobin is increased in said cell or its progeny relative to a cell or its progeny of the same cell type that does not comprise the gRNA molecule.

249. A cell comprising an indel shown in FIG. 25, Table 15, Table 26, Table 27, or Table 37.

250. A population of cells comprising the cell of claim 246.

251. A method of preparing a population of human cells, comprising:
(a) providing a population of human cells;
(b) culturing said population of human cells ex vivo in a cell culture medium comprising a stem cell expander; and
(c) introducing into said human cells of said population of human cells a gRNA molecule of claim 231 or a nucleic acid molecule encoding a gRNA molecule of claim 231.

252. The method of claim 251, wherein the indel in each of said cells of the population of cells is an indel shown in FIG. 25, Table 15, Table 26, Table 27 or Table 37.
